United States Patent Application Publication US 2010/0291551 A1 - sequence listing, part 6

SEQ ID NO: 9723 - DNA, 6457 bp, Homo sapiens
gtgaagcggcgaaggaggtggtggctgcgttgggctccgggaagccgttcgggctggggctgtcggccgcggggcggaggcactcgcgcggggggtaattcggggtctgggttctggtgccgcgcagctttccccgtctaaaagttggttttaattggttgcccacaggattgacttggccattcctgatgggggcgtgcatattgtagggggtgaactgggtgaggctttcatcgtttttgccactgatgaagatgcaaggcttggtatgatgcgcacaggtggtacaattaaagggtcaaaagtaacactattgttgagtagtaagacggaaatgcagaatatgattgaactgagtcgtaggcgttttgaaactgccaacttagatataccaccagcaaatgccagtagatcaggaccaccacctagctcaggaatgagtagcagggtaaacttgcccacaacagtatccaactttaataatccatcacccagtgtagttactgccaccacttctgttcatgaaagcaacaaaaacatacagacattttccacagccagcgtaggaacagctcctccaaatatgggggcttcctttgggagcccaacgtttagctcaactgttccaagcacagcctctccaatgaacacagtcccgccgccaccaattcctccaattccagcgatgccatctctgccaccaatgccatccattcccccaattccagttcctcctccagtacctacattgcctcctgtgcctcctgtgcccccgattcccccagttccttctgtgccacccatgaccccactgccacccatgtcgggcatgccgcccttgaatccgccacctgtggcacctctacctgctggaatgaatggctctggagcacctatgaatttgaacaataatctgaatcctatgtttcttggtccgttgaatcctgttaaccctatccagatgaactctcagagcagtgtgaagccactccccatcaaccctgatgatctgtatgtcagtgtgcatggaatgcccttttctgcaatggaaaatgatgtcagagatttttttcatgggctccgtgttgatgcagtgcatttgttgaaagatcatgtaggtcgaaataatgggaatggattggttaagtttctctcccctcaagatacatttgaagctttgaaacgaaacagaatgctgatgattcaacgctatgtggaagttagccctgccacagaaagacagtgggtagctgctggaggccatatcacttttaagcaaaatatgggaccttctggacaaactcatccccctcctcagacacttcccaggtcaaaatcgcccagtgggcagaaaagatcaaggtcaagatcaccacatgaggctggtttttgtgtttacttgaaagggctaccatttgaagcagaaaacaaacatgtcattgatttttttaaaaagctggatattgtggaagatagtatttatatagcttatggacccaatgggaaagcaactggcgaaggctttgtagagttcagaaatgaggctgactataaggctgctctgtgtcgtcataaacagtacatgggcaatcgctttattcaagttcatccaattactaagaaaggtatgctagaaaagatagatatgattcgaaaaagactgcagaacttcagctatgaccagagggaaatgatactaaatccagagggggatgtcaactctgccaaagtctgtgcccacataacaaatattccattcagcattacaaagatggatgttcttcagttcctagaaggaatcccagtggatgaaaatgctgtacatgttcttgttgataacaatgggcaaggtctaggacaggcattggttcagtttaaaaatgaagatgatgcacgtaagtctgaacgcttacaccgtaaaaaacttaatgggagagaagcttttgttcatgtagttaccctagaagatatgagagagattgagaaaaatccccctgcccaaggaaaaaagggattaaagatgcctgtgccaggtaatcctgcagttccaggaatgcccaatgcgggactgcccggtgtgggactgcccagtgcaggacttcccggtgcaggcctgcccagcacaggactgcctggttcagcaataaccagtgcaggactgcctggtgcgggaatgcccagtgcaggaatacctagtgcaggaggtgaagagcatgccttcctgactgtaggatcaaaggaagccaataatgggcctccatttaactttcctggtaattttggtggatcaaatgcctttgggccaccaatccctcctccaggattaggaggcggggcctttggtgatgctaggcctggtatgccttcagttggaaacagtggtttgcctggtctaggactggatgttccgggttttggaggtggaccaaacaatttaagtgggccatcgggatttggagggggccctcagaattttggaaatggccctggtagcttaggcggtcccccggggtttggaagtggccctcctggtcttggaagtgcccctgggcatttgggtgggccaccagcttttgggcctggccccggccccggccccggccctggcccaatccatattggtggtccccctggctttgcatctagttctggaaaaccaggaccgacagtaattaaagtgcaaaacatgccctttactgtgtctattgatgagattttagatttcttttatggctatcaagtaatcccaggctcagtgtgtttaaaatacaatgaaaaaggtatgcccacaggtgaagccatggtggcctttgagtctcgggatgaagccacagctgctgtcattgacttaaatgacaggcctataggttcaagaaaagtaaaacttgtattagggtagccattcacatcattttttatagggtagatcttcatattgctgtgattaatgcatccagattgttttcctagtatttccaggttagaacctgtggattgtttcaattgcatatagcttggtttccataacatagagcattggttgactgtttacagaagactcactcaccaggataaacattgctgtatgttacagtaaagctatctggagagaacacataaatgattttggcataccattagagaaaccatttgtaaaactcaaatgaccacataaagcttatcaaggagtctagattggttttgttttataccatatgggatgaagaaaatagaaatgtcagtagaactcattgagggtgctcttgccagctgctgaaaatagaagttggctactctcagaatttggtttaaagctggacagatttgctttgttatagggtaaagctttgtctaaagtcctcattttcttttaaaattgaataaaatttctgtatacagattcattgtatgtacctttattgcttcttaagggtccttgctgtatagacagtcctgcttcagaagttgctgctttgtttgtctaattgactcatttgtaaatgagcagaactgttttgttggtttttttccctaaatataaaagtccacacttcgtttgtgctataacctcaaactttgatttctaatgtcacacttaaaactgtgtggaataagacttttgccataaaaataaactatggagtcctttatctaccagagcctttttggtttgaccgccacgatttaggttagtcagtttaaaaattgttcatgttgtttggatggtatcgaaaaccagaaaccacttttaataatgtgtttaagatacttgatttgaagtccttttcatatggactaattgtagtatcaatttcctcctgtcccgattatgtgaaattttggcctttaaacaaagaggggcccattcataagaaagtgttatatctaggtttttaaaactgaagttgaaattatctttgttagcagtagtagtatagaataaaagatccgtatgctggttcgtagattgatacgtgttagtcctgttatttggaggctttttggcatagttgttcgatcaggagcctgtttactaaaagtcttcatacagagtacaagtgcagccgccagaggagaaaattgagattcttgaccctttcatactcttttctttggtattcaggacactaaggcaggaggaccacatgagttctggttggtaagtgtccttgtcatgaaaacacttgccttacaaggctctaattatgatttccctagtcagtgctctgaagatgtgtcacattatattataaacaatacggaaggggagataggtgagatgatatgaaaaacaaattttctcactgtcataaaaggctctaattatggttactttccttgtgatgaaaaacttggccttacagggctctagttatggttactttccctagtcaatgctctgaaaatgtgtcacattataaacaatacagaaggagagatagatgagagatcatgaaaaccaaattttatcttttacatggcccctttgtcttcgtttgaaacatccccaacatttcctacaaatcagcgtagttacaaaggggtcagtcttttaaaataagtatttcctattaaactatatatatatacagtgcctttttggtgttgtgagtcagtggaacactgaaatacagcggttgtgtaatttaagagtggcaacagtttcatttgataagatttgaaaaggctttttatcactacaatcttagaggattgacagtacaggatttttgtttaagagaaggattgtttagactcaagaggtgactatgttgtgggtcttttgataattcatgaatacagatttgctttgaccgatcactagatactgcctcctcaatttcaaaagcaatataacgtttgtatatgctgtttaatttaagttaatgttaagtaatcatttctcattccaaagacaatgcaaaaaacttcagcactgcttgagagttgtatttcagccacagatattttctccattggaaagctattttcattttagaaaaatgggttgtttgaagatgaaagtcttttatcttttttcacaatttattttggttatatgttcgtacattcttattaaatatttcatacactttattgcaactactttgttatttctacatcttagataaatgctgaaaaggaaaacgatttcattgttcatctaattaaataaattaaaagagcggtttgtgtagaaattggagagaactatgttttatatgaatcacaacagtgctcgttgtggactgtaattaaatgctttgccctctggaacttgatttttgtgtatctgagatttattaacagtgctaactgctaaggatactgtttatcttgttctgggcattggagtttcagtttttaaaaaattcttgaaaatgtattctgtgaaactactcatacctctcttcctgcgaattttctcctaagaactaggtttggggtagaaatgaattgacattattttctcatttgctttgtatggtatgaaggatttgtaaagctttgctcaaagttgtgtgcatttgtaaacactatcatgatattttcaattttatgtgtaaattttattgtctgtttttggtgactctgacattaatggaagagaatattttccattagatttaattttttttcctctcccttctgattttttttttattggtgttcatttttcttttgatttaaaggattagagaaatctacaaatgtatgtcataaataagcaaatttgtaaacttttctgaactttagtgaaacatttagttcacaagcataatttggaggtgtgttctgtgtttacacagtagtttggatgtacaattattattagtggctttttaaaaaatgaaacagtgttaagtgaaatgtagttcctagctttgtactccaagttgtcaaagcatcaacaatgaaaattcgattaggaaactttatttaaaatttcaggtagtaatattcagtgtagttaaggccagtcttaacccactggatgaaaatctaggactgtatggaagtaagcaaacattacatttttaggtggaaatagtcagccttgcataaaaacaaggatgcgtgaaagccttaaattccagctcccttttactggagtctgtggttgtgtacaggtatgggccaagtgtaaaatctcatcaattttaagaacactcgggaaatgagtaaagaaaatgtaaaattgctgctagtcaaatcttttggaaagaatttctggaagtggtcactttaaaaattattttccacccttgcaaaattgccacatttaaattgttttactggcagttctatagtagtccagactttagaaaccaaacacaacaaaatggcttgttgccaatatggccacaacattgccagcaaatactgccttggcatcactcagcagaggtttttgtttataaagatgaagtcttgaatactgttcaataaacttgtc

SEQ ID NO: 9724 - protein, 876 aa, Homo sapiens; identical to SEQ ID NO: 9688

SEQ ID NO: 9725 - DNA, 6141 bp, Homo sapiens
gtgaagcggcgaaggaggtggtggctgcgttgggctccgggaagccgttcgggctggggctgtcggccgcggggcggaggcactcgcgcggggggtaattcggggtctgggttctggtgccgcgcagctttccccgtctaaaagttggttttaattggttgcccacaggattgacttggcctctacttcttgttaaggaaattcatctcttgttttatcaggtgtgtgtggtttcagcgcaccagcgtaggaacagctcctccaaatatgggggcttcctttgggagcccaacgtttagctcaactgttccaagcacagcctctccaatgaacacagtcccgccgccaccaattcctccaattccagcgatgccatctctgccaccaatgccatccattcccccaattccagttcctcctccagtacctacattgcctcctgtgcctcctgtgcccccgattcccccagttccttctgtgccacccatgaccccactgccacccatgtcgggcatgccgcccttgaatccgccacctgtggcacctctacctgctggaatgaatggctctggagcacctatgaatttgaacaataatctgaatcctatgtttcttggtccgttgaatcctgttaaccctatccagatgaactctcagagcagtgtgaagccactccccatcaaccctgatgatctgtatgtcagtgtgcatggaatgcccttttctgcaatggaaaatgatgtcagagatttttttcatgggctccgtgttgatgcagtgcatttgttgaaagatcatgtaggtcgaaataatgggaatggattggttaagtttctctcccctcaagatacatttgaagctttgaaacgaaacagaatgctgatgattcaacgctatgtggaagttagccctgccacagaaagacagtgggtagctgctggaggccatatcacttttaagcaaaatatgggaccttctggacaaactcatccccctcctcagacacttcccaggtcaaaatcgcccagtgggcagaaaagatcaaggtcaagatcaccacatgaggctggtttttgtgtttacttgaaagggctaccatttgaagcagaaaacaaacatgtcattgatttttttaaaaagctggatattgtggaagatagtatttatatagcttatggacccaatgggaaagcaactggcgaaggctttgtagagttcagaaatgaggctgactataaggctgctctgtgtcgtcataaacagtacatgggcaatcgctttattcaagttcatccaattactaagaaaggtatgctagaaaagatagatatgattcgaaaaagactgcagaacttcagctatgaccagagggaaatgatactaaatccagagggggatgtcaactctgccaaagtctgtgcccacataacaaatattccattcagcattacaaagatggatgttcttcagttcctagaaggaatcccagtggatgaaaatgctgtacatgttcttgttgataacaatgggcaaggtctaggacaggcattggttcagtttaaaaatgaagatgatgcacgtaagtctgaacgcttacaccgtaaaaaacttaatgggagagaagcttttgttcatgtagttaccctagaagatatgagagagattgagaaaaatccccctgcccaaggaaaaaagggattaaagatgcctgtgccaggtaatcctgcagttccaggaatgcccaatgcgggactgcccggtgtgggactgcccagtgcaggacttcccggtgcaggcctgcccagcacaggactgcctggttcagcaataaccagtgcaggactgcctggtgcgggaatgcccagtgcaggaatacctagtgcaggaggtgaagagcatgccttcctgactgtaggatcaaaggaagccaataatgggcctccatttaactttcctggtaattttggtggatcaaatgcctttgggccaccaatccctcctccaggattaggaggcggggcctttggtgatgctaggcctggtatgccttcagttggaaacagtggtttgcctggtctaggactggatgttccgggttttggaggtggaccaaacaatttaagtgggccatcgggatttggagggggccctcagaattttggaaatggccctggtagcttaggcggtcccccggggtttggaagtggccctcctggtcttggaagtgcccctgggcatttgggtgggccaccagcttttgggcctggccccggccccggccccggccctggcccaatccatattggtggtccccctggctttgcatctagttctggaaaaccaggaccgacagtaattaaagtgcaaaacatgccctttactgtgtctattgatgagattttagatttcttttatggctatcaagtaatcccaggctcagtgtgtttaaaatacaatgaaaaaggtatgcccacaggtgaagccatggtggcctttgagtctcgggatgaagccacagctgctgtcattgacttaaatgacaggcctataggttcaagaaaagtaaaacttgtattagggtagccattcacatcattttttatagggtagatcttcatattgctgtgattaatgcatccagattgttttcctagtatttccaggttagaacctgtggattgtttcaattgcatatagcttggtttccataacatagagcattggttgactgtttacagaagactcactcaccaggataaacattgctgtatgttacagtaaagctatctggagagaacacataaatgattttggcataccattagagaaaccatttgtaaaactcaaatgaccacataaagcttatcaaggagtctagattggttttgttttataccatatgggatgaagaaaatagaaatgtcagtagaactcattgagggtgctcttgccagctgctgaaaatagaagttggctactctcagaatttggtttaaagctggacagatttgctttgttatagggtaaagctttgtctaaagtcctcattttcttttaaaattgaataaaatttctgtatacagattcattgtatgtacctttattgcttcttaagggtccttgctgtatagacagtcctgcttcagaagttgctgctttgtttgtctaattgactcatttgtaaatgagcagaactgttttgttggtttttttccctaaatataaaagtccacacttcgtttgtgctataacctcaaactttgatttctaatgtcacacttaaaactgtgtggaataagacttttgccataaaaataaactatggagtcctttatctaccagagcctttttggtttgaccgccacgatttaggttagtcagtttaaaaattgttcatgttgtttggatggtatcgaaaaccagaaaccacttttaataatgtgtttaagatacttgatttgaagtccttttcatatggactaattgtagtatcaatttcctcctgtcccgattatgtgaaattttggcctttaaacaaagaggggcccattcataagaaagtgttatatctaggtttttaaaactgaagttgaaattatctttgttagcagtagtagtatagaataaaagatccgtatgctggttcgtagattgatacgtgttagtcctgttatttggaggctttttggcatagttgttcgatcaggagcctgtttactaaaagtcttcatacagagtacaagtgcagccgccagaggagaaaattgagattcttgaccctttcatactcttttctttggtattcaggacactaaggcaggaggaccacatgagttctggttggtaagtgtccttgtcatgaaaacacttgccttacaaggctctaattatgatttccctagtcagtgctctgaagatgtgtcacattatattataaacaatacggaaggggagataggtgagatgatatgaaaaacaaattttctcactgtcataaaaggctctaattatggttactttccttgtgatgaaaaacttggccttacagggctctagttatggttactttccctagtcaatgctctgaaaatgtgtcacattataaacaatacagaaggagagatagatgagagatcatgaaaaccaaattttatcttttacatggcccctttgtcttcgtttgaaacatccccaacatttcctacaaatcagcgtagttacaaaggggtcagtcttttaaaataagtatttcctattaaactatatatatatacagtgcctttttggtgttgtgagtcagtggaacactgaaatacagcggttgtgtaatttaagagtggcaacagtttcatttgataagatttgaaaaggctttttatcactacaatcttagaggattgacagtacaggatttttgtttaagagaaggattgtttagactcaagaggtgactatgttgtgggtcttttgataattcatgaatacagatttgctttgaccgatcactagatactgcctcctcaatttcaaaagcaatataacgtttgtatatgctgtttaatttaagttaatgttaagtaatcatttctcattccaaagacaatgcaaaaaacttcagcactgcttgagagttgtatttcagccacagatattttctccattggaaagctattttcattttagaaaaatgggttgtttgaagatgaaagtcttttatcttttttcacaatttattttggttatatgttcgtacattcttattaaatatttcatacactttattgcaactactttgttatttctacatcttagataaatgctgaaaaggaaaacgatttcattgttcatctaattaaataaattaaaagagcggtttgtgtagaaattggagagaactatgttttatatgaatcacaacagtgctcgttgtggactgtaattaaatgctttgccctctggaacttgatttttgtgtatctgagatttattaacagtgctaactgctaaggatactgtttatcttgttctgggcattggagtttcagtttttaaaaaattcttgaaaatgtattctgtgaaactactcatacctctcttcctgcgaattttctcctaagaactaggtttggggtagaaatgaattgacattattttctcatttgctttgtatggtatgaaggatttgtaaagctttgctcaaagttgtgtgcatttgtaaacactatcatgatattttcaattttatgtgtaaattttattgtctgtttttggtgactctgacattaatggaagagaatattttccattagatttaattttttttcctctcccttctgattttttttttattggtgttcatttttcttttgatttaaaggattagagaaatctacaaatgtatgtcataaataagcaaatttgtaaacttttctgaactttagtgaaacatttagttcacaagcataatttggaggtgtgttctgtgtttacacagtagtttggatgtacaattattattagtggctttttaaaaaatgaaacagtgttaagtgaaatgtagttcctagctttgtactccaagttgtcaaagcatcaacaatgaaaattcgattaggaaactttatttaaaatttcaggtagtaatattcagtgtagttaaggccagtcttaacccactggatgaaaatctaggactgtatggaagtaagcaaacattacatttttaggtggaaatagtcagccttgcataaaaacaaggatgcgtgaaagccttaaattccagctcccttttactggagtctgtggttgtgtacaggtatgggccaagtgtaaaatctcatcaattttaagaacactcgggaaatgagtaaagaaaatgtaaaattgctgctagtcaaatcttttggaaagaatttctggaagtggtcactttaaaaattattttccacccttgcaaaattgccacatttaaattgttttactggcagttctatagtagtccagactttagaaaccaaacacaacaaaatggcttgttgccaatatggccacaacattgccagcaaatactgccttggcatcactcagcagaggtttttgtttataaagatgaagtcttgaatactgttcaataaacttgtc

SEQ ID NO: 9726 - protein, 771 aa, Homo sapiens; identical to SEQ ID NO: 9686

SEQ ID NO: 9727 - DNA, 6524 bp, Homo sapiens
ggccattttgtgaagcggcgaaggaggtggtggctgcgttgggctccgggaagccgttcgggctggggctgtcggccgcggggcggaggcactcgcgcggggggtaattcggggtctgggttctggtgccgcgcagctttccccggtgtgtgtggtttcagcgcagcatggctgtggtcatccgtttgcaaggtctcccaattgtggcggggaccatggacattcgccacttcttctctggattgaccattcctgatgggggcgtgcatattgtagggggtgaactgggtgaggctttcatcgtttttgccactgatgaagatgcaaggcttggtatgatgcgcacaggtggtacaattaaagggtcaaaagtaacactattgttgagtagtaagacggaaatgcagaatatgattgaactgagtcgtaggcgttttgaaactgccaacttagatataccaccagcaaatgccagtagatcaggaccaccacctagctcaggaatgagtagcagggtaaacttgcccacaacagtatccaactttaataatccatcacccagtgtagttactgccaccacttctgttcatgaaagcaacaaaaacatacagacattttccacagccagcgtaggaacagctcctccaaatatgggggcttcctttgggagcccaacgtttagctcaactgttccaagcacagcctctccaatgaacacagtcccgccgccaccaattcctccaattccagcgatgccatctctgccaccaatgccatccattcccccaattccagttcctcctccagtacctacattgcctcctgtgcctcctgtgcccccgattcccccagttccttctgtgccacccatgaccccactgccacccatgtcgggcatgccgcccttgaatccgccacctgtggcacctctacctgctggaatgaatggctctggagcacctatgaatttgaacaataatctgaatcctatgtttcttggtccgttgaatcctgttaaccctatccagatgaactctcagagcagtgtgaagccactccccatcaaccctgatgatctgtatgtcagtgtgcatggaatgcccttttctgcaatggaaaatgatgtcagagatttttttcatgggctccgtgttgatgcagtgcatttgttgaaagatcatgtaggtcgaaataatgggaatggattggttaagtttctctcccctcaagatacatttgaagctttgaaacgaaacagaatgctgatgattcaacgctatgtggaagttagccctgccacagaaagacagtgggtagctgctggaggccatatcacttttaagcaaaatatgggaccttctggacaaactcatccccctcctcagacacttcccaggtcaaaatcgcccagtgggcagaaaagatcaaggtcaagatcaccacatgaggctggtttttgtgtttacttgaaagggctaccatttgaagcagaaaacaaacatgtcattgatttttttaaaaagctggatattgtggaagatagtatttatatagcttatggacccaatgggaaagcaactggcgaaggctttgtagagttcagaaatgaggctgactataaggctgctctgtgtcgtcataaacagtacatgggcaatcgctttattcaagttcatccaattactaagaaaggtatgctagaaaagatagatatgattcgaaaaagactgcagaacttcagctatgaccagagggaaatgatactaaatccagagggggatgtcaactctgccaaagtctgtgcccacataacaaatattccattcagcattacaaagatggatgttcttcagttcctagaaggaatcccagtggatgaaaatgctgtacatgttcttgttgataacaatgggcaaggtctaggacaggcattggttcagtttaaaaatgaagatgatgcacgtaagtctgaacgcttacaccgtaaaaaacttaatgggagagaagcttttgttcatgtagttaccctagaagatatgagagagattgagaaaaatccccctgcccaaggaaaaaagggattaaagatgcctgtgccaggtaatcctgcagttccaggaatgcccaatgcgggactgcccggtgtgggactgcccagtgcaggacttcccggtgcaggcctgcccagcacaggactgcctggttcagcaataaccagtgcaggactgcctggtgcgggaatgcccagtgcaggaatacctagtgcaggaggtgaagagcatgccttcctgactgtaggatcaaaggaagccaataatgggcctccatttaactttcctggtaattttggtggatcaaatgcctttgggccaccaatccctcctccaggattaggaggcggggcctttggtgatgctaggcctggtatgccttcagttggaaacagtggtttgcctggtctaggactggatgttccgggttttggaggtggaccaaacaatttaagtgggccatcgggatttggagggggccctcagaattttggaaatggccctggtagcttaggcggtcccccggggtttggaagtggccctcctggtcttggaagtgcccctgggcatttgggtgggccaccagcttttgggcctggccccggccccggccccggccctggcccaatccatattggtggtccccctggctttgcatctagttctggaaaaccaggaccgacagtaattaaagtgcaaaacatgccctttactgtgtctattgatgagattttagatttcttttatggctatcaagtaatcccaggctcagtgtgtttaaaatacaatgaaaaaggtatgcccacaggtgaagccatggtggcctttgagtctcgggatgaagccacagctgctgtcattgacttaaatgacaggcctataggttcaagaaaagtaaaacttgtattagggtagccattcacatcattttttatagggtagatcttcatattgctgtgattaatgcatccagattgttttcctagtatttccaggttagaacctgtggattgtttcaattgcatatagcttggtttccataacatagagcattggttgactgtttacagaagactcactcaccaggataaacattgctgtatgttacagtaaagctatctggagagaacacataaatgattttggcataccattagagaaaccatttgtaaaactcaaatgaccacataaagcttatcaaggagtctagattggttttgttttataccatatgggatgaagaaaatagaaatgtcagtagaactcattgagggtgctcttgccagctgctgaaaatagaagttggctactctcagaatttggtttaaagctggacagatttgctttgttatagggtaaagctttgtctaaagtcctcattttcttttaaaattgaataaaatttctgtatacagattcattgtatgtacctttattgcttcttaagggtccttgctgtatagacagtcctgcttcagaagttgctgctttgtttgtctaattgactcatttgtaaatgagcagaactgttttgttggtttttttccctaaatataaaagtccacacttcgtttgtgctataacctcaaactttgatttctaatgtcacacttaaaactgtgtggaataagacttttgccataaaaataaactatggagtcctttatctaccagagcctttttggtttgaccgccacgatttaggttagtcagtttaaaaattgttcatgttgtttggatggtatcgaaaaccagaaaccacttttaataatgtgtttaagatacttgatttgaagtccttttcatatggactaattgtagtatcaatttcctcctgtcccgattatgtgaaattttggcctttaaacaaagaggggcccattcataagaaagtgttatatctaggtttttaaaactgaagttgaaattatctttgttagcagtagtagtatagaataaaagatccgtatgctggttcgtagattgatacgtgttagtcctgttatttggaggctttttggcatagttgttcgatcaggagcctgtttactaaaagtcttcatacagagtacaagtgcagccgccagaggagaaaattgagattcttgaccctttcatactcttttctttggtattcaggacactaaggcaggaggaccacatgagttctggttggtaagtgtccttgtcatgaaaacacttgccttacaaggctctaattatgatttccctagtcagtgctctgaagatgtgtcacattatattataaacaatacggaaggggagataggtgagatgatatgaaaaacaaattttctcactgtcataaaaggctctaattatggttactttccttgtgatgaaaaacttggccttacagggctctagttatggttactttccctagtcaatgctctgaaaatgtgtcacattataaacaatacagaaggagagatagatgagagatcatgaaaaccaaattttatcttttacatggcccctttgtcttcgtttgaaacatccccaacatttcctacaaatcagcgtagttacaaaggggtcagtcttttaaaataagtatttcctattaaactatatatatatacagtgcctttttggtgttgtgagtcagtggaacactgaaatacagcggttgtgtaatttaagagtggcaacagtttcatttgataagatttgaaaaggctttttatcactacaatcttagaggattgacagtacaggatttttgtttaagagaaggattgtttagactcaagaggtgactatgttgtgggtcttttgataattcatgaatacagatttgctttgaccgatcactagatactgcctcctcaatttcaaaagcaatataacgtttgtatatgctgtttaatttaagttaatgttaagtaatcatttctcattccaaagacaatgcaaaaaacttcagcactgcttgagagttgtatttcagccacagatattttctccattggaaagctattttcattttagaaaaatgggttgtttgaagatgaaagtcttttatcttttttcacaatttattttggttatatgttcgtacattcttattaaatatttcatacactttattgcaactactttgttatttctacatcttagataaatgctgaaaaggaaaacgatttcattgttcatctaattaaataaattaaaagagcggtttgtgtagaaattggagagaactatgttttatatgaatcacaacagtgctcgttgtggactgtaattaaatgctttgccctctggaacttgatttttgtgtatctgagatttattaacagtgctaactgctaaggatactgtttatcttgttctgggcattggagtttcagtttttaaaaaattcttgaaaatgtattctgtgaaactactcatacctctcttcctgcgaattttctcctaagaactaggtttggggtagaaatgaattgacattattttctcatttgctttgtatggtatgaaggatttgtaaagctttgctcaaagttgtgtgcatttgtaaacactatcatgatattttcaattttatgtgtaaattttattgtctgtttttggtgactctgacattaatggaagagaatattttccattagatttaattttttttcctctcccttctgattttttttttattggtgttcatttttcttttgatttaaaggattagagaaatctacaaatgtatgtcataaataagcaaatttgtaaacttttctgaactttagtgaaacatttagttcacaagcataatttggaggtgtgttctgtgtttacacagtagtttggatgtacaattattattagtggctttttaaaaaatgaaacagtgttaagtgaaatgtagttcctagctttgtactccaagttgtcaaagcatcaacaatgaaaattcgattaggaaactttatttaaaatttcaggtagtaatattcagtgtagttaaggccagtcttaacccactggatgaaaatctaggactgtatggaagtaagcaaacattacatttttaggtggaaatagtcagccttgcataaaaacaaggatgcgtgaaagccttaaattccagctcccttttactggagtctgtggttgtgtacaggtatgggccaagtgtaaaatctcatcaattttaagaacactcgggaaatgagtaaagaaaatgtaaaattgctgctagtcaaatcttttggaaagaatttctggaagtggtcactttaaaaattattttccacccttgcaaaattgccacatttaaattgttttactggcagttctatagtagtccagactttagaaaccaaacacaacaaaatggcttgttgccaatatggccacaacattgccagcaaatactgccttggcatcactcagcagaggtttttgtttataaagatgaagtcttgaatactgttcaataaacttgtc

SEQ ID NO: 9728 - protein, 932 aa, Homo sapiens; identical to SEQ ID NO: 1239

SEQ ID NO: 9729 - DNA, 5786 bp, Homo sapiens
ggccattttgtgaagcggcgaaggaggtggtggctgcgttgggctccgggaagccgttcgggctggggctgtcggccgcggggcggaggcactcgcgcggggggtaattcggggtctgggttctggtgccgcgcagctttccccgtctaaaagttggttttaattggttgcccacaggattgacttggcctctacctgctggaatgaatggctctggagcacctatgaatttgaacaataatctgaatcctatgtttcttggtccgttgaatcctgttaaccctatccagatgaactctcagagcagtgtgaagccactccccatcaaccctgatgatctgtatgtcagtgtgcatggaatgcccttttctgcaatggaaaatgatgtcagagatttttttcatgggctccgtgttgatgcagtgcatttgttgaaagatcatgtaggtcgaaataatgggaatggattggttaagtttctctcccctcaagatacatttgaagctttgaaacgaaacagaatgctgatgattcaacgctatgtggaagttagccctgccacagaaagacagtgggtagctgctggaggccatatcacttttaagcaaaatatgggaccttctggacaaactcatccccctcctcagacacttcccaggtcaaaatcgcccagtgggcagaaaagatcaaggtcaagatcaccacatgaggctggtttttgtgtttacttgaaagggctaccatttgaagcagaaaacaaacatgtcattgatttttttaaaaagctggatattgtggaagatagtatttatatagcttatggacccaatgggaaagcaactggcgaaggctttgtagagttcagaaatgaggctgactataaggctgctctgtgtcgtcataaacagtacatgggcaatcgctttattcaagttcatccaattactaagaaaggtatgctagaaaagatagatatgattcgaaaaagactgcagaacttcagctatgaccagagggaaatgatactaaatccagagggggatgtcaactctgccaaagtctgtgcccacataacaaatattccattcagcattacaaagatggatgttcttcagttcctagaaggaatcccagtggatgaaaatgctgtacatgttcttgttgataacaatgggcaaggtctaggacaggcattggttcagtttaaaaatgaagatgatgcacgtaagtctgaacgcttacaccgtaaaaaacttaatgggagagaagcttttgttcatgtagttaccctagaagatatgagagagattgagaaaaatccccctgcccaaggaaaaaagggattaaagatgcctgtgccaggtaatcctgcagttccaggaatgcccaatgcgggactgcccggtgtgggactgcccagtgcaggacttcccggtgcaggcctgcccagcacaggactgcctggttcagcaataaccagtgcaggactgcctggtgcgggaatgcccagtgcaggaatacctagtgcaggaggtgaagagcatgccttcctgactgtaggatcaaaggaagccaataatgggcctccatttaactttcctggtaattttggtggatcaaatgcctttgggccaccaatccctcctccaggattaggaggcggggcctttggtgatgctaggcctggtatgccttcagttggaaacagtggtttgcctggtctaggactggatgttccgggttttggaggtggaccaaacaatttaagtgggccatcgggatttggagggggccctcagaattttggaaatggccctggtagcttaggcggtcccccggggtttggaagtggccctcctggtcttggaagtgcccctgggcatttgggtgggccaccagcttttgggcctggccccggccccggccccggccctggcccaatccatattggtggtccccctggctttgcatctagttctggaaaaccaggaccgacagtaattaaagtgcaaaacatgccctttactgtgtctattgatgagattttagatttcttttatggctatcaagtaatcccaggctcagtgtgtttaaaatacaatgaaaaaggtatgcccacaggtgaagccatggtggcctttgagtctcgggatgaagccacagctgctgtcattgacttaaatgacaggcctataggttcaagaaaagtaaaacttgtattagggtagccattcacatcattttttatagggtagatcttcatattgctgtgattaatgcatccagattgttttcctagtatttccaggttagaacctgtggattgtttcaattgcatatagcttggtttccataacatagagcattggttgactgtttacagaagactcactcaccaggataaacattgctgtatgttacagtaaagctatctggagagaacacataaatgattttggcataccattagagaaaccatttgtaaaactcaaatgaccacataaagcttatcaaggagtctagattggttttgttttataccatatgggatgaagaaaatagaaatgtcagtagaactcattgagggtgctcttgccagctgctgaaaatagaagttggctactctcagaatttggtttaaagctggacagatttgctttgttatagggtaaagctttgtctaaagtcctcattttcttttaaaattgaataaaatttctgtatacagattcattgtatgtacctttattgcttcttaagggtccttgctgtatagacagtcctgcttcagaagttgctgctttgtttgtctaattgactcatttgtaaatgagcagaactgttttgttggtttttttccctaaatataaaagtccacacttcgtttgtgctataacctcaaactttgatttctaatgtcacacttaaaactgtgtggaataagacttttgccataaaaataaactatggagtcctttatctaccagagcctttttggtttgaccgccacgatttaggttagtcagtttaaaaattgttcatgttgtttggatggtatcgaaaaccagaaaccacttttaataatgtgtttaagatacttgatttgaagtccttttcatatggactaattgtagtatcaatttcctcctgtcccgattatgtgaaattttggcctttaaacaaagaggggcccattcataagaaagtgttatatctaggtttttaaaactgaagttgaaattatctttgttagcagtagtagtatagaataaaagatccgtatgctggttcgtagattgatacgtgttagtcctgttatttggaggctttttggcatagttgttcgatcaggagcctgtttactaaaagtcttcatacagagtacaagtgcagccgccagaggagaaaattgagattcttgaccctttcatactcttttctttggtattcaggacactaaggcaggaggaccacatgagttctggttggtaagtgtccttgtcatgaaaacacttgccttacaaggctctaattatgatttccctagtcagtgctctgaagatgtgtcacattatattataaacaatacggaaggggagataggtgagatgatatgaaaaacaaattttctcactgtcataaaaggctctaattatggttactttccttgtgatgaaaaacttggccttacagggctctagttatggttactttccctagtcaatgctctgaaaatgtgtcacattataaacaatacagaaggagagatagatgagagatcatgaaaaccaaattttatcttttacatggcccctttgtcttcgtttgaaacatccccaacatttcctacaaatcagcgtagttacaaaggggtcagtcttttaaaataagtatttcctattaaactatatatatatacagtgcctttttggtgttgtgagtcagtggaacactgaaatacagcggttgtgtaatttaagagtggcaacagtttcatttgataagatttgaaaaggctttttatcactacaatcttagaggattgacagtacaggatttttgtttaagagaaggattgtttagactcaagaggtgactatgttgtgggtcttttgataattcatgaatacagatttgctttgaccgatcactagatactgcctcctcaatttcaaaagcaatataacgtttgtatatgctgtttaatttaagttaatgttaagtaatcatttctcattccaaagacaatgcaaaaaacttcagcactgcttgagagttgtatttcagccacagatattttctccattggaaagctattttcattttagaaaaatgggttgtttgaagatgaaagtcttttatcttttttcacaatttattttggttatatgttcgtacattcttattaaatatttcatacactttattgcaactactttgttatttctacatcttagataaatgctgaaaaggaaaacgatttcattgttcatctaattaaataaattaaaagagcggtttgtgtagaaattggagagaactatgttttatatgaatcacaacagtgctcgttgtggactgtaattaaatgctttgccctctggaacttgatttttgtgtatctgagatttattaacagtgctaactgctaaggatactgtttatcttgttctgggcattggagtttcagtttttaaaaaattcttgaaaatgtattctgtgaaactactcatacctctcttcctgcgaattttctcctaagaactaggtttggggtagaaatgaattgacattattttctcatttgctttgtatggtatgaaggatttgtaaagctttgctcaaagttgtgtgcatttgtaaacactatcatgatattttcaattttatgtgtaaattttattgtctgtttttggtgactctgacattaatggaagagaatattttccattagatttaattttttttcctctcccttctgattttttttttattggtgttcatttttcttttgatttaaaggattagagaaatctacaaatgtatgtcataaataagcaaatttgtaaacttttctgaactttagtgaaacatttagttcacaagcataatttggaggtgtgttctgtgtttacacagtagtttggatgtacaattattattagtggctttttaaaaaatgaaacagtgttaagtgaaatgtagttcctagctttgtactccaagttgtcaaagcatcaacaatgaaaattcgattaggaaactttatttaaaatttcaggtagtaatattcagtgtagttaaggccagtcttaacccactggatgaaaatctaggactgtatggaagtaagcaaacattacatttttaggtggaaatagtcagccttgcataaaaacaaggatgcgtgaaagccttaaattccagctcccttttactggagtctgtggttgtgtacaggtatgggccaagtgtaaaatctcatcaattttaagaacactcgggaaatgagtaaagaaaatgtaaaattgctgctagtcaaatcttttggaaagaatttctggaagtggtcactttaaaaattattttccacccttgcaaaattgccacatttaaattgttttactggcagttctatagtagtccagactttagaaaccaaacacaacaaaatggcttgttgccaatatggccacaacattgccagcaaatactgccttggcatcactcagcagaggtttttgtttataaagatgaagtcttgaatactgttcaataaacttgtc

SEQ ID NO: 9730 - protein, 674 aa, Homo sapiens; identical to SEQ ID NO: 9698

SEQ ID NO: 9731 - DNA, 5507 bp, Homo sapiens
ggaacgcggagccgctgagcgggccgacggccattttgtgaagcggcgaaggaggtggtggctgcgttgggctccgggaagccgttcgggctggggctgtcggccgcggggcggaggcactcgcgcgggggtctaaaagttggttttaattggttgcccacaggattgacttggcctctacttcttgttaaggaaattcatctcttgttttatcaggtgtgtgtggtttcagcgcagcatggctgtggtcatccgtttgcaaggtctcccaattgtggcggggaccatggacattcgccacttcttctctggattgaccattcctgatgggggcgtgcatattgtagggggtgaactgggtgaggctttcatcgtttttgccactgatgaagatgcaaggcttggtatgatgcgcacaggtggtacaattaaagggtcaaaagtaacactattgttgagtagtaagacggaaatgcagaatatgattgaactgattttttaaaaagctggatattgtggaagatagtatttatatagcttatggacccaatgggaaagcaactggcgaaggctttgtagagttcagaaatgaggctgactataaggctgctctgtgtcgtcataaacagtacatgggcaatcgctttattcaagttcatccaattactaagaaaggtatgctagaaaagatagatatgattcgaaaaagactgcagaacttcagctatgaccagagggaaatgatactaaatccagagggggatgtcaactctgccaaagtctgtgcccacataacaaatattccattcagcattacaaagatggatgttcttcagttcctagaaggaatcccagtggatgaaaatgctgtacatgttcttgttgataacaatgggcaaggtctaggacaggcattggttcagtttaaaaatgaagatgatgcacgtaagtctgaacgcttacaccgtaaaaaacttaatgggagagaagcttttgttcatgtagttaccctagaagatatgagagagattgagaaaaatccccctgcccaaggaaaaaagggattaaagatgcctgtgccaggtaatcctgcagttccaggaatgcccaatgcgggactgcccggtgtgggactgcccagtgcaggacttcccggtgcaggcctgcccagcacaggactgcctggttcagcaataaccagtgcaggactgcctggtgcgggaatgcccagtgcaggaatacctagtgcaggaggtgaagagcatgccttcctgactgtaggatcaaaggaagccaataatgggcctccatttaactttcctggtaattttggtggatcaaatgcctttgggccaccaatccctcctccaggattaggaggcggggcctttggtgatgctaggcctggtatgccttcagttggaaacagtggtttgcctggtctaggactggatgttccgggttttggaggtggaccaaacaatttaagtgggccatcgggatttggagggggccctcagaattttggaaatggccctggtagcttaggcggtcccccggggtttggaagtggccctcctggtcttggaagtgcccctgggcatttgggtgggccaccagcttttgggcctggccccggccccggccccggccctggcccaatccatattggtggtccccctggctttgcatctagttctggaaaaccaggaccgacagtaattaaagtgcaaaacatgccctttactgtgtctattgatgagattttagatttcttttatggctatcaagtaatcccaggctcagtgtgtttaaaatacaatgaaaaaggtatgcccacaggtgaagccatggtggcctttgagtctcgggatgaagccacagctgctgtcattgacttaaatgacaggcctataggttcaagaaaagtaaaacttgtattagggtagccattcacatcattttttatagggtagatcttcatattgctgtgattaatgcatccagattgttttcctagtatttccaggttagaacctgtggattgtttcaattgcatatagcttggtttccataacatagagcattggttgactgtttacagaagactcactcaccaggataaacattgctgtatgttacagtaaagctatctggagagaacacataaatgattttggcataccattagagaaaccatttgtaaaactcaaatgaccacataaagcttatcaaggagtctagattggttttgttttataccatatgggatgaagaaaatagaaatgtcagtagaactcattgagggtgctcttgccagctgctgaaaatagaagttggctactctcagaatttggtttaaagctggacagatttgctttgttatagggtaaagctttgtctaaagtcctcattttcttttaaaattgaataaaatttctgtatacagattcattgtatgtacctttattgcttcttaagggtccttgctgtatagacagtcctgcttcagaagttgctgctttgtttgtctaattgactcatttgtaaatgagcagaactgttttgttggtttttttccctaaatataaaagtccacacttcgtttgtgctataacctcaaactttgatttctaatgtcacacttaaaactgtgtggaataagacttttgccataaaaataaactatggagtcctttatctaccagagcctttttggtttgaccgccacgatttaggttagtcagtttaaaaattgttcatgttgtttggatggtatcgaaaaccagaaaccacttttaataatgtgtttaagatacttgatttgaagtccttttcatatggactaattgtagtatcaatttcctcctgtcccgattatgtgaaattttggcctttaaacaaagaggggcccattcataagaaagtgttatatctaggtttttaaaactgaagttgaaattatctttgttagcagtagtagtatagaataaaagatccgtatgctggttcgtagattgatacgtgttagtcctgttatttggaggctttttggcatagttgttcgatcaggagcctgtttactaaaagtcttcatacagagtacaagtgcagccgccagaggagaaaattgagattcttgaccctttcatactcttttctttggtattcaggacactaaggcaggaggaccacatgagttctggttggtaagtgtccttgtcatgaaaacacttgccttacaaggctctaattatgatttccctagtcagtgctctgaagatgtgtcacattatattataaacaatacggaaggggagataggtgagatgatatgaaaaacaaattttctcactgtcataaaaggctctaattatggttactttccttgtgatgaaaaacttggccttacagggctctagttatggttactttccctagtcaatgctctgaaaatgtgtcacattataaacaatacagaaggagagatagatgagagatcatgaaaaccaaattttatcttttacatggcccctttgtcttcgtttgaaacatccccaacatttcctacaaatcagcgtagttacaaaggggtcagtcttttaaaataagtatttcctattaaactatatatatatacagtgcctttttggtgttgtgagtcagtggaacactgaaatacagcggttgtgtaatttaagagtggcaacagtttcatttgataagatttgaaaaggctttttatcactacaatcttagaggattgacagtacaggatttttgtttaagagaaggattgtttagactcaagaggtgactatgttgtgggtcttttgataattcatgaatacagatttgctttgaccgatcactagatactgcctcctcaatttcaaaagcaatataacgtttgtatatgctgtttaatttaagttaatgttaagtaatcatttctcattccaaagacaatgcaaaaaacttcagcactgcttgagagttgtatttcagccacagatattttctccattggaaagctattttcattttagaaaaatgggttgtttgaagatgaaagtcttttatcttttttcacaatttattttggttatatgttcgtacattcttattaaatatttcatacactttattgcaactactttgttatttctacatcttagataaatgctgaaaaggaaaacgatttcattgttcatctaattaaataaattaaaagagcggtttgtgtagaaattggagagaactatgttttatatgaatcacaacagtgctcgttgtggactgtaattaaatgctttgccctctggaacttgatttttgtgtatctgagatttattaacagtgctaactgctaaggatactgtttatcttgttctgggcattggagtttcagtttttaaaaaattcttgaaaatgtattctgtgaaactactcatacctctcttcctgcgaattttctcctaagaactaggtttggggtagaaatgaattgacattattttctcatttgctttgtatggtatgaaggatttgtaaagctttgctcaaagttgtgtgcatttgtaaacactatcatgatattttcaattttatgtgtaaattttattgtctgtttttggtgactctgacattaatggaagagaatattttccattagatttaattttttttcctctcccttctgattttttttttattggtgttcatttttcttttgatttaaaggattagagaaatctacaaatgtatgtcataaataagcaaatttgtaaacttttctgaactttagtgaaacatttagttcacaagcataatttggaggtgtgttctgtgtttacacagtagtttggatgtacaattattattagtggctttttaaaaaatgaaacagtgttaagtgaaatgtagttcctagctttgtactccaagttgtcaaagcatcaacaatgaaaattcgattaggaaactttatttaaaatttcaggtagtaatattcagtgtagttaaggccagtcttaacccactggatgaaaatctaggactgtatggaagtaagcaaacattacatttttaggtggaaatagtcagccttgcataaaaacaaggatgcgtgaaagccttaaattccagctcccttttactggagtctgtggttgtgtacaggtatgggccaagtgtaaaatctcatcaattttaagaacactcgggaaatgagtaaagaaaatgtaaaattgctgctagtcaaatcttttggaaagaatttctggaagtggtcactttaaaaattattttccacccttgcaaaattgccacatttaaattgttttactggcagttctatagtagtccagactttagaaaccaaacacaacaaaatggcttgttgccaatatggccacaacattgccagcaaatactgccttggcatcactcagcagaggtttttgtttataaagatgaagtcttgaatactgttcaataaacttgtc

SEQ ID NO: 9732 - protein, 87 aa, Homo sapiens; identical to SEQ ID NO: 9700

SEQ ID NO: 9733 - DNA, 6596 bp, Homo sapiens
tggaacgcggagccgctgagcgggccgacggccattttgtgaagcggcgaaggaggtggtggctgcgttgggctccgggaagccgttcgggctggggctgtcggccgcggggcggaggcactcgcgcgggggtctaaaagttggttttaattggttgcccacaggattgacttggcctctacttcttgttaaggaaattcatctcttgttttatcaggtgtgtgtggtttcagcgcagcatggctgtggtcatccgtttgcaaggtctcccaattgtggcggggaccatggacattcgccacttcttctctggattgaccattcctgatgggggcgtgcatattgtagggggtgaactgggtgaggctttcatcgtttttgccactgatgaagatgcaaggcttggtatgatgcgcacaggtggtacaattaaagggtcaaaagtaacactattgttgagtagtaagacggaaatgcagaatatgattgaactgagtcgtaggcgttttgaaactgccaacttagatataccaccagcaaatgccagtagatcaggaccaccacctagctcaggaatgagtagcagggtaaacttgcccacaacagtatccaactttaataatccatcacccagtgtagttactgccaccacttctgttcatgaaagcaacaaaaacatacagacattttccacagccagcgtaggaacagctcctccaaatatgggggcttcctttgggagcccaacgtttagctcaactgttccaagcacagcctctccaatgaacacagtcccgccgccaccaattcctccaattccagcgatgccatctctgccaccaatgccatccattcccccaattccagttcctcctccagtacctacattgcctcctgtgcctcctgtgcccccgattcccccagttccttctgtgccacccatgaccccactgccacccatgtcgggcatgccgcccttgaatccgccacctgtggcacctctacctgctggaatgaatggctctggagcacctatgaatttgaacaataatctgaatcctatgtttcttggtccgttgaatcctgttaaccctatccagatgaactctcagagcagtgtgaagccactccccatcaaccctgatgatctgtatgtcagtgtgcatggaatgcccttttctgcaatggaaaatgatgtcagagatttttttcatgggctccgtgttgatgcagtgcatttgttgaaagatcatgtaggtcgaaataatgggaatggattggttaagtttctctcccctcaagatacatttgaagctttgaaacgaaacagaatgctgatgattcaacgctatgtggaagttagccctgccacagaaagacagtgggtagctgctggaggccatatcacttttaagcaaaatatgggaccttctggacaaactcatccccctcctcagacacttcccaggtcaaaatcgcccagtgggcagaaaagatcaaggtcaagatcaccacatgaggctggtttttgtgtttacttgaaagggctaccatttgaagcagaaaacaaacatgtcattgatttttttaaaaagctggatattgtggaagatagtatttatatagcttatggacccaatgggaaagcaactggcgaaggctttgtagagttcagaaatgaggctgactataaggctgctctgtgtcgtcataaacagtacatgggcaatcgctttattcaagttcatccaattactaagaaaggtatgctagaaaagatagatatgattcgaaaaagactgcagaacttcagctatgaccagagggaaatgatactaaatccagagggggatgtcaactctgccaaagtctgtgcccacataacaaatattccattcagcattacaaagatggatgttcttcagttcctagaaggaatcccagtggatgaaaatgctgtacatgttcttgttgataacaatgggcaaggtctaggacaggcattggttcagtttaaaaatgaagatgatgcacgtaagtctgaacgcttacaccgtaaaaaacttaatgggagagaagcttttgttcatgtagttaccctagaagatatgagagagattgagaaaaatccccctgcccaaggaaaaaagggattaaagatgcctgtgccaggtaatcctgcagttccaggaatgcccaatgcgggactgcccggtgtgggactgcccagtgcaggacttcccggtgcaggcctgcccagcacaggactgcctggttcagcaataaccagtgcaggactgcctggtgcgggaatgcccagtgcaggaatacctagtgcaggaggtgaagagcatgccttcctgactgtaggatcaaaggaagccaataatgggcctccatttaactttcctggtaattttggtggatcaaatgcctttgggccaccaatccctcctccaggattaggaggcggggcctttggtgatgctaggcctggtatgccttcagttggaaacagtggtttgcctggtctaggactggatgttccgggttttggaggtggaccaaacaatttaagtgggccatcgggatttggagggggccctcagaattttggaaatggccctggtagcttaggcggtcccccggggtttggaagtggccctcctggtcttggaagtgcccctgggcatttgggtgggccaccagcttttgggcctggccccggccccggccccggccctggcccaatccatattggtggtccccctggctttgcatctagttctggaaaaccaggaccgacagtaattaaagtgcaaaacatgccctttactgtgtctattgatgagattttagatttcttttatggctatcaagtaatcccaggctcagtgtgtttaaaatacaatgaaaaaggtatgcccacaggtgaagccatggtggcctttgagtctcgggatgaagccacagctgctgtcattgacttaaatgacaggcctataggttcaagaaaagtaaaacttgtattagggtagccattcacatcattttttatagggtagatcttcatattgctgtgattaatgcatccagattgttttcctagtatttccaggttagaacctgtggattgtttcaattgcatatagcttggtttccataacatagagcattggttgactgtttacagaagactcactcaccaggataaacattgctgtatgttacagtaaagctatctggagagaacacataaatgattttggcataccattagagaaaccatttgtaaaactcaaatgaccacataaagcttatcaaggagtctagattggttttgttttataccatatgggatgaagaaaatagaaatgtcagtagaactcattgagggtgctcttgccagctgctgaaaatagaagttggctactctcagaatttggtttaaagctggacagatttgctttgttatagggtaaagctttgtctaaagtcctcattttcttttaaaattgaataaaatttctgtatacagattcattgtatgtacctttattgcttcttaagggtccttgctgtatagacagtcctgcttcagaagttgctgctttgtttgtctaattgactcatttgtaaatgagcagaactgttttgttggtttttttccctaaatataaaagtccacacttcgtttgtgctataacctcaaactttgatttctaatgtcacacttaaaactgtgtggaataagacttttgccataaaaataaactatggagtcctttatctaccagagcctttttggtttgaccgccacgatttaggttagtcagtttaaaaattgttcatgttgtttggatggtatcgaaaaccagaaaccacttttaataatgtgtttaagatacttgatttgaagtccttttcatatggactaattgtagtatcaatttcctcctgtcccgattatgtgaaattttggcctttaaacaaagaggggcccattcataagaaagtgttatatctaggtttttaaaactgaagttgaaattatctttgttagcagtagtagtatagaataaaagatccgtatgctggttcgtagattgatacgtgttagtcctgttatttggaggctttttggcatagttgttcgatcaggagcctgtttactaaaagtcttcatacagagtacaagtgcagccgccagaggagaaaattgagattcttgaccctttcatactcttttctttggtattcaggacactaaggcaggaggaccacatgagttctggttggtaagtgtccttgtcatgaaaacacttgccttacaaggctctaattatgatttccctagtcagtgctctgaagatgtgtcacattatattataaacaatacggaaggggagataggtgagatgatatgaaaaacaaattttctcactgtcataaaaggctctaattatggttactttccttgtgatgaaaaacttggccttacagggctctagttatggttactttccctagtcaatgctctgaaaatgtgtcacattataaacaatacagaaggagagatagatgagagatcatgaaaaccaaattttatcttttacatggcccctttgtcttcgtttgaaacatccccaacatttcctacaaatcagcgtagttacaaaggggtcagtcttttaaaataagtatttcctattaaactatatatatatacagtgcctttttggtgttgtgagtcagtggaacactgaaatacagcggttgtgtaatttaagagtggcaacagtttcatttgataagatttgaaaaggctttttatcactacaatcttagaggattgacagtacaggatttttgtttaagagaaggattgtttagactcaagaggtgactatgttgtgggtcttttgataattcatgaatacagatttgctttgaccgatcactagatactgcctcctcaatttcaaaagcaatataacgtttgtatatgctgtttaatttaagttaatgttaagtaatcatttctcattccaaagacaatgcaaaaaacttcagcactgcttgagagttgtatttcagccacagatattttctccattggaaagctattttcattttagaaaaatgggttgtttgaagatgaaagtcttttatcttttttcacaatttattttggttatatgttcgtacattcttattaaatatttcatacactttattgcaactactttgttatttctacatcttagataaatgctgaaaaggaaaacgatttcattgttcatctaattaaataaattaaaagagcggtttgtgtagaaattggagagaactatgttttatatgaatcacaacagtgctcgttgtggactgtaattaaatgctttgccctctggaacttgatttttgtgtatctgagatttattaacagtgctaactgctaaggatactgtttatcttgttctgggcattggagtttcagtttttaaaaaattcttgaaaatgtattctgtgaaactactcatacctctcttcctgcgaattttctcctaagaactaggtttggggtagaaatgaattgacattattttctcatttgctttgtatggtatgaaggatttgtaaagctttgctcaaagttgtgtgcatttgtaaacactatcatgatattttcaattttatgtgtaaattttattgtctgtttttggtgactctgacattaatggaagagaatattttccattagatttaattttttttcctctcccttctgattttttttttattggtgttcatttttcttttgatttaaaggattagagaaatctacaaatgtatgtcataaataagcaaatttgtaaacttttctgaactttagtgaaacatttagttcacaagcataatttggaggtgtgttctgtgtttacacagtagtttggatgtacaattattattagtggctttttaaaaaatgaaacagtgttaagtgaaatgtagttcctagctttgtactccaagttgtcaaagcatcaacaatgaaaattcgattaggaaactttatttaaaatttcaggtagtaatattcagtgtagttaaggccagtcttaacccactggatgaaaatctaggactgtatggaagtaagcaaacattacatttttaggtggaaatagtcagccttgcataaaaacaaggatgcgtgaaagccttaaattccagctcccttttactggagtctgtggttgtgtacaggtatgggccaagtgtaaaatctcatcaattttaagaacactcgggaaatgagtaaagaaaatgtaaaattgctgctagtcaaatcttttggaaagaatttctggaagtggtcactttaaaaattattttccacccttgcaaaattgccacatttaaattgttttactggcagttctatagtagtccagactttagaaaccaaacacaacaaaatggcttgttgccaatatggccacaacattgccagcaaatactgccttggcatcactcagcagaggtttttgtttataaagatgaagtcttgaatactgttcaataaacttgtc

SEQ ID NO: 9734 - protein, 932 aa, Homo sapiens; identical to SEQ ID NO: 1239

SEQ ID NO: 9735 - DNA, 6642 bp, Homo sapiens
cttctggaacgcggagccgctgagcgggccgacggccattttgtgaagcggcgaaggaggtggtggctgcgttgggctccgggaagccgttcgggctggggctgtcggccgcggggcggaggcactcgcgcggggggtaattcggggtctgggttctggtgccgcgcagctttccccgtctaaaagttggttttaattggttgcccacaggattgacttggcctctacttcttgttaaggaaattcatctcttgttttatcaggtgtgtgtggtttcagcgcagcatggctgtggtcatccgtttgcaaggtctcccaattgtggcggggaccatggacattcgccacttcttctctggattgaccattcctgatgggggcgtgcatattgtagggggtgaactgggtgaggctttcatcgtttttgccactgatgaagatgcaaggcttggtatgatgcgcacaggtggtacaattaaagggtcaaaagtaacactattgttgagtagtaagacggaaatgcagaatatgattgaactgagtcgtaggcgttttgaaactgccaacttagatataccaccagcaaatgccagtagatcaggaccaccacctagctcaggaatgagtagcagggtaaacttgcccacaacagtatccaactttaataatccatcacccagtgtagttactgccaccacttctgttcatgaaagcaacaaaaacatacagacattttccacagccagcgtaggaacagctcctccaaatatgggggcttcctttgggagcccaacgtttagctcaactgttccaagcacagcctctccaatgaacacagtcccgccgccaccaattcctccaattccagcgatgccatctctgccaccaatgccatccattcccccaattccagttcctcctccagtacctacattgcctcctgtgcctcctgtgcccccgattcccccagttccttctgtgccacccatgaccccactgccacccatgtcgggcatgccgcccttgaatccgccacctgtggcacctctacctgctggaatgaatggctctggagcacctatgaatttgaacaataatctgaatcctatgtttcttggtccgttgaatcctgttaaccctatccagatgaactctcagagcagtgtgaagccactccccatcaaccctgatgatctgtatgtcagtgtgcatggaatgcccttttctgcaatggaaaatgatgtcagagatttttttcatgggctccgtgttgatgcagtgcatttgttgaaagatcatgtaggtcgaaataatgggaatggattggttaagtttctctcccctcaagatacatttgaagctttgaaacgaaacagaatgctgatgattcaacgctatgtggaagttagccctgccacagaaagacagtgggtagctgctggaggccatatcacttttaagcaaaatatgggaccttctggacaaactcatccccctcctcagacacttcccaggtcaaaatcgcccagtgggcagaaaagatcaaggtcaagatcaccacatgaggctggtttttgtgtttacttgaaagggctaccatttgaagcagaaaacaaacatgtcattgatttttttaaaaagctggatattgtggaagatagtatttatatagcttatggacccaatgggaaagcaactggcgaaggctttgtagagttcagaaatgaggctgactataaggctgctctgtgtcgtcataaacagtacatgggcaatcgctttattcaagttcatccaattactaagaaaggtatgctagaaaagatagatatgattcgaaaaagactgcagaacttcagctatgaccagagggaaatgatactaaatccagagggggatgtcaactctgccaaagtctgtgcccacataacaaatattccattcagcattacaaagatggatgttcttcagttcctagaaggaatcccagtggatgaaaatgctgtacatgttcttgttgataacaatgggcaaggtctaggacaggcattggttcagtttaaaaatgaagatgatgcacgtaagtctgaacgcttacaccgtaaaaaacttaatgggagagaagcttttgttcatgtagttaccctagaagatatgagagagattgagaaaaatccccctgcccaaggaaaaaagggattaaagatgcctgtgccaggtaatcctgcagttccaggaatgcccaatgcgggactgcccggtgtgggactgcccagtgcaggacttcccggtgcaggcctgcccagcacaggactgcctggttcagcaataaccagtgcaggactgcctggtgcgggaatgcccagtgcaggaatacctagtgcaggaggtgaagagcatgccttcctgactgtaggatcaaaggaagccaataatgggcctccatttaactttcctggtaattttggtggatcaaatgcctttgggccaccaatccctcctccaggattaggaggcggggcctttggtgatgctaggcctggtatgccttcagttggaaacagtggtttgcctggtctaggactggatgttccgggttttggaggtggaccaaacaatttaagtgggccatcgggatttggagggggccctcagaattttggaaatggccctggtagcttaggcggtcccccggggtttggaagtggccctcctggtcttggaagtgcccctgggcatttgggtgggccaccagcttttgggcctggccccggccccggccccggccctggcccaatccatattggtggtccccctggctttgcatctagttctggaaaaccaggaccgacagtaattaaagtgcaaaacatgccctttactgtgtctattgatgagattttagatttcttttatggctatcaagtaatcccaggctcagtgtgtttaaaatacaatgaaaaaggtatgcccacaggtgaagccatggtggcctttgagtctcgggatgaagccacagctgctgtcattgacttaaatgacaggcctataggttcaagaaaagtaaaacttgtattagggtagccattcacatcattttttatagggtagatcttcatattgctgtgattaatgcatccagattgttttcctagtatttccaggttagaacctgtggattgtttcaattgcatatagcttggtttccataacatagagcattggttgactgtttacagaagactcactcaccaggataaacattgctgtatgttacagtaaagctatctggagagaacacataaatgattttggcataccattagagaaaccatttgtaaaactcaaatgaccacataaagcttatcaaggagtctagattggttttgttttataccatatgggatgaagaaaatagaaatgtcagtagaactcattgagggtgctcttgccagctgctgaaaatagaagttggctactctcagaatttggtttaaagctggacagatttgctttgttatagggtaaagctttgtctaaagtcctcattttcttttaaaattgaataaaatttctgtatacagattcattgtatgtacctttattgcttcttaagggtccttgctgtatagacagtcctgcttcagaagttgctgctttgtttgtctaattgactcatttgtaaatgagcagaactgttttgttggtttttttccctaaatataaaagtccacacttcgtttgtgctataacctcaaactttgatttctaatgtcacacttaaaactgtgtggaataagacttttgccataaaaataaactatggagtcctttatctaccagagcctttttggtttgaccgccacgatttaggttagtcagtttaaaaattgttcatgttgtttggatggtatcgaaaaccagaaaccacttttaataatgtgtttaagatacttgatttgaagtccttttcatatggactaattgtagtatcaatttcctcctgtcccgattatgtgaaattttggcctttaaacaaagaggggcccattcataagaaagtgttatatctaggtttttaaaactgaagttgaaattatctttgttagcagtagtagtatagaataaaagatccgtatgctggttcgtagattgatacgtgttagtcctgttatttggaggctttttggcatagttgttcgatcaggagcctgtttactaaaagtcttcatacagagtacaagtgcagccgccagaggagaaaattgagattcttgaccctttcatactcttttctttggtattcaggacactaaggcaggaggaccacatgagttctggttggtaagtgtccttgtcatgaaaacacttgccttacaaggctctaattatgatttccctagtcagtgctctgaagatgtgtcacattatattataaacaatacggaaggggagataggtgagatgatatgaaaaacaaattttctcactgtcataaaaggctctaattatggttactttccttgtgatgaaaaacttggccttacagggctctagttatggttactttccctagtcaatgctctgaaaatgtgtcacattataaacaatacagaaggagagatagatgagagatcatgaaaaccaaattttatcttttacatggcccctttgtcttcgtttgaaacatccccaacatttcctacaaatcagcgtagttacaaaggggtcagtcttttaaaataagtatttcctattaaactatatatatatacagtgcctttttggtgttgtgagtcagtggaacactgaaatacagcggttgtgtaatttaagagtggcaacagtttcatttgataagatttgaaaaggctttttatcactacaatcttagaggattgacagtacaggatttttgtttaagagaaggattgtttagactcaagaggtgactatgttgtgggtcttttgataattcatgaatacagatttgctttgaccgatcactagatactgcctcctcaatttcaaaagcaatataacgtttgtatatgctgtttaatttaagttaatgttaagtaatcatttctcattccaaagacaatgcaaaaaacttcagcactgcttgagagttgtatttcagccacagatattttctccattggaaagctattttcattttagaaaaatgggttgtttgaagatgaaagtcttttatcttttttcacaatttattttggttatatgttcgtacattcttattaaatatttcatacactttattgcaactactttgttatttctacatcttagataaatgctgaaaaggaaaacgatttcattgttcatctaattaaataaattaaaagagcggtttgtgtagaaattggagagaactatgttttatatgaatcacaacagtgctcgttgtggactgtaattaaatgctttgccctctggaacttgatttttgtgtatctgagatttattaacagtgctaactgctaaggatactgtttatcttgttctgggcattggagtttcagtttttaaaaaattcttgaaaatgtattctgtgaaactactcatacctctcttcctgcgaattttctcctaagaactaggtttggggtagaaatgaattgacattattttctcatttgctttgtatggtatgaaggatttgtaaagctttgctcaaagttgtgtgcatttgtaaacactatcatgatattttcaattttatgtgtaaattttattgtctgtttttggtgactctgacattaatggaagagaatattttccattagatttaattttttttcctctcccttctgattttttttttattggtgttcatttttcttttgatttaaaggattagagaaatctacaaatgtatgtcataaataagcaaatttgtaaacttttctgaactttagtgaaacatttagttcacaagcataatttggaggtgtgttctgtgtttacacagtagtttggatgtacaattattattagtggctttttaaaaaatgaaacagtgttaagtgaaatgtagttcctagctttgtactccaagttgtcaaagcatcaacaatgaaaattcgattaggaaactttatttaaaatttcaggtagtaatattcagtgtagttaaggccagtcttaacccactggatgaaaatctaggactgtatggaagtaagcaaacattacatttttaggtggaaatagtcagccttgcataaaaacaaggatgcgtgaaagccttaaattccagctcccttttactggagtctgtggttgtgtacaggtatgggccaagtgtaaaatctcatcaattttaagaacactcgggaaatgagtaaagaaaatgtaaaattgctgctagtcaaatcttttggaaagaatttctggaagtggtcactttaaaaattattttccacccttgcaaaattgccacatttaaattgttttactggcagttctatagtagtccagactttagaaaccaaacacaacaaaatggcttgttgccaatatggccacaacattgccagcaaatactgccttggcatcactcagcagaggtttttgtttataaagatgaagtcttgaatactgttcaataaacttgtc

SEQ ID NO: 9736 - protein, 932 aa, Homo sapiens; identical to SEQ ID NO: 1239

SEQ ID NO: 9737 - DNA, 6510 bp, Homo sapiens
aaccacgccgttcctcccccttctggaacgcggagccgctgagcgggccgacggccattttgtgaagcggcgaaggaggattgacttggcctctacttcttgttaaggaaattcatctcttgttttatcaggtgtgtgtggtttcagcgcagcatggctgtggtcatccgtttgcaaggtctcccaattgtggcggggaccatggacattcgccacttcttctctggattgaccattcctgatgggggcgtgcatattgtagggggtgaactgggtgaggctttcatcgtttttgccactgatgaagatgcaaggcttggtatgatgcgcacaggtggtacaattaaagggtcaaaagtaacactattgttgagtagtaagacggaaatgcagaatatgattgaactgagtcgtaggcgttttgaaactgccaacttagatataccaccagcaaatgccagtagatcaggaccaccacctagctcaggaatgagtagcagggtaaacttgcccacaacagtatccaactttaataatccatcacccagtgtagttactgccaccacttctgttcatgaaagcaacaaaaacatacagacattttccacagccagcgtaggaacagctcctccaaatatgggggcttcctttgggagcccaacgtttagctcaactgttccaagcacagcctctccaatgaacacagtcccgccgccaccaattcctccaattccagcgatgccatctctgccaccaatgccatccattcccccaattccagttcctcctccagtacctacattgcctcctgtgcctcctgtgcccccgattcccccagttccttctgtgccacccatgaccccactgccacccatgtcgggcatgccgcccttgaatccgccacctgtggcacctctacctgctggaatgaatggctctggagcacctatgaatttgaacaataatctgaatcctatgtttcttggtccgttgaatcctgttaaccctatccagatgaactctcagagcagtgtgaagccactccccatcaaccctgatgatctgtatgtcagtgtgcatggaatgcccttttctgcaatggaaaatgatgtcagagatttttttcatgggctccgtgttgatgcagtgcatttgttgaaagatcatgtaggtcgaaataatgggaatggattggttaagtttctctcccctcaagatacatttgaagctttgaaacgaaacagaatgctgatgattcaacgctatgtggaagttagccctgccacagaaagacagtgggtagctgctggaggccatatcacttttaagcaaaatatgggaccttctggacaaactcatccccctcctcagacacttcccaggtcaaaatcgcccagtgggcagaaaagatcaaggtcaagatcaccacatgaggctggtttttgtgtttacttgaaagggctaccatttgaagcagaaaacaaacatgtcattgatttttttaaaaagctggatattgtggaagatagtatttatatagcttatggacccaatgggaaagcaactggcgaaggctttgtagagttcagaaatgaggctgactataaggctgctctgtgtcgtcataaacagtacatgggcaatcgctttattcaagttcatccaattactaagaaaggtatgctagaaaagatagatatgattcgaaaaagactgcagaacttcagctatgaccagagggaaatgatactaaatccagagggggatgtcaactctgccaaagtctgtgcccacataacaaatattccattcagcattacaaagatggatgttcttcagttcctagaaggaatcccagtggatgaaaatgctgtacatgttcttgttgataacaatgggcaaggtctaggacaggcattggttcagtttaaaaatgaagatgatgcacgtaagtctgaacgcttacaccgtaaaaaacttaatgggagagaagcttttgttcatgtagttaccctagaagatatgagagagattgagaaaaatccccctgcccaaggaaaaaagggattaaagatgcctgtgccaggtaatcctgcagttccaggaatgcccaatgcgggactgcccggtgtgggactgcccagtgcaggacttcccggtgcaggcctgcccagcacaggactgcctggttcagcaataaccagtgcaggactgcctggtgcgggaatgcccagtgcaggaatacctagtgcaggaggtgaagagcatgccttcctgactgtaggatcaaaggaagccaataatgggcctccatttaactttcctggtaattttggtggatcaaatgcctttgggccaccaatccctcctccaggattaggaggcggggcctttggtgatgctaggcctggtatgccttcagttggaaacagtggtttgcctggtctaggactggatgttccgggttttggaggtggaccaaacaatttaagtgggccatcgggatttggagggggccctcagaattttggaaatggccctggtagcttaggcggtcccccggggtttggaagtggccctcctggtcttggaagtgcccctgggcatttgggtgggccaccagcttttgggcctggccccggccccggccccggccctggcccaatccatattggtggtccccctggctttgcatctagttctggaaaaccaggaccgacagtaattaaagtgcaaaacatgccctttactgtgtctattgatgagattttagatttcttttatggctatcaagtaatcccaggctcagtgtgtttaaaatacaatgaaaaaggtatgcccacaggtgaagccatggtggcctttgagtctcgggatgaagccacagctgctgtcattgacttaaatgacaggcctataggttcaagaaaagtaaaacttgtattagggtagccattcacatcattttttatagggtagatcttcatattgctgtgattaatgcatccagattgttttcctagtatttccaggttagaacctgtggattgtttcaattgcatatagcttggtttccataacatagagcattggttgactgtttacagaagactcactcaccaggataaacattgctgtatgttacagtaaagctatctggagagaacacataaatgattttggcataccattagagaaaccatttgtaaaactcaaatgaccacataaagcttatcaaggagtctagattggttttgttttataccatatgggatgaagaaaatagaaatgtcagtagaactcattgagggtgctcttgccagctgctgaaaatagaagttggctactctcagaatttggtttaaagctggacagatttgctttgttatagggtaaagctttgtctaaagtcctcattttcttttaaaattgaataaaatttctgtatacagattcattgtatgtacctttattgcttcttaagggtccttgctgtatagacagtcctgcttcagaagttgctgctttgtttgtctaattgactcatttgtaaatgagcagaactgttttgttggtttttttccctaaatataaaagtccacacttcgtttgtgctataacctcaaactttgatttctaatgtcacacttaaaactgtgtggaataagacttttgccataaaaataaactatggagtcctttatctaccagagcctttttggtttgaccgccacgatttaggttagtcagtttaaaaattgttcatgttgtttggatggtatcgaaaaccagaaaccacttttaataatgtgtttaagatacttgatttgaagtccttttcatatggactaattgtagtatcaatttcctcctgtcccgattatgtgaaattttggcctttaaacaaagaggggcccattcataagaaagtgttatatctaggtttttaaaactgaagttgaaattatctttgttagcagtagtagtatagaataaaagatccgtatgctggttcgtagattgatacgtgttagtcctgttatttggaggctttttggcatagttgttcgatcaggagcctgtttactaaaagtcttcatacagagtacaagtgcagccgccagaggagaaaattgagattcttgaccctttcatactcttttctttggtattcaggacactaaggcaggaggaccacatgagttctggttggtaagtgtccttgtcatgaaaacacttgccttacaaggctctaattatgatttccctagtcagtgctctgaagatgtgtcacattatattataaacaatacggaaggggagataggtgagatgatatgaaaaacaaattttctcactgtcataaaaggctctaattatggttactttccttgtgatgaaaaacttggccttacagggctctagttatggttactttccctagtcaatgctctgaaaatgtgtcacattataaacaatacagaaggagagatagatgagagatcatgaaaaccaaattttatcttttacatggcccctttgtcttcgtttgaaacatccccaacatttcctacaaatcagcgtagttacaaaggggtcagtcttttaaaataagtatttcctattaaactatatatatatacagtgcctttttggtgttgtgagtcagtggaacactgaaatacagcggttgtgtaatttaagagtggcaacagtttcatttgataagatttgaaaaggctttttatcactacaatcttagaggattgacagtacaggatttttgtttaagagaaggattgtttagactcaagaggtgactatgttgtgggtcttttgataattcatgaatacagatttgctttgaccgatcactagatactgcctcctcaatttcaaaagcaatataacgtttgtatatgctgtttaatttaagttaatgttaagtaatcatttctcattccaaagacaatgcaaaaaacttcagcactgcttgagagttgtatttcagccacagatattttctccattggaaagctattttcattttagaaaaatgggttgtttgaagatgaaagtcttttatcttttttcacaatttattttggttatatgttcgtacattcttattaaatatttcatacactttattgcaactactttgttatttctacatcttagataaatgctgaaaaggaaaacgatttcattgttcatctaattaaataaattaaaagagcggtttgtgtagaaattggagagaactatgttttatatgaatcacaacagtgctcgttgtggactgtaattaaatgctttgccctctggaacttgatttttgtgtatctgagatttattaacagtgctaactgctaaggatactgtttatcttgttctgggcattggagtttcagtttttaaaaaattcttgaaaatgtattctgtgaaactactcatacctctcttcctgcgaattttctcctaagaactaggtttggggtagaaatgaattgacattattttctcatttgctttgtatggtatgaaggatttgtaaagctttgctcaaagttgtgtgcatttgtaaacactatcatgatattttcaattttatgtgtaaattttattgtctgtttttggtgactctgacattaatggaagagaatattttccattagatttaattttttttcctctcccttctgattttttttttattggtgttcatttttcttttgatttaaaggattagagaaatctacaaatgtatgtcataaataagcaaatttgtaaacttttctgaactttagtgaaacatttagttcacaagcataatttggaggtgtgttctgtgtttacacagtagtttggatgtacaattattattagtggctttttaaaaaatgaaacagtgttaagtgaaatgtagttcctagctttgtactccaagttgtcaaagcatcaacaatgaaaattcgattaggaaactttatttaaaatttcaggtagtaatattcagtgtagttaaggccagtcttaacccactggatgaaaatctaggactgtatggaagtaagcaaacattacatttttaggtggaaatagtcagccttgcataaaaacaaggatgcgtgaaagccttaaattccagctcccttttactggagtctgtggttgtgtacaggtatgggccaagtgtaaaatctcatcaattttaagaacactcgggaaatgagtaaagaaaatgtaaaattgctgctagtcaaatcttttggaaagaatttctggaagtggtcactttaaaaattattttccacccttgcaaaattgccacatttaaattgttttactggcagttctatagtagtccagactttagaaaccaaacacaacaaaatggcttgttgccaatatggccacaacattgccagcaaatactgccttggcatcactcagcagaggtttttgtttataaagatgaagtcttgaatactgttcaataaacttgtc

SEQ ID NO: 9738 - protein, 932 aa, Homo sapiens; identical to SEQ ID NO: 1239

SEQ ID NO: 9739 - DNA, 5192 bp, Homo sapiens
gaaatgcctccgaggtccattgctggggaggggctttactcgagggtgtagcagttttgagaagccggcgtctgaagctaggagtctaaaagttggttttaattggttgcccacaggattgacttggcctctacttcttgttaaggaaattcatctcttgttttatcaggtgtgtgtggtttcagcgcagcatggctgtggtcatccgtttgcaaggtctcccaattgtggcggggaccatggacattcgccacttcttctctggattgaccattcctgatgggggcgtgcatattgtagggggtgaactgggtgaggctttcatcgtttttgccactgatgaagatgcaaggcttggtatgatgcgcacaggtggtacaattaaagggtcaaaagtaacactattgttgagtagtaagacggaaatgcagaatatgattgaactgagtcgtaggcgttttgaaactgccaacttagatataccaccagcaaatgccagtagatcaggaccaccacctagctcaggaatgagtagcagggtaaacttgcccacaacagtatccaactttaataatccatcacccagtgtagttactgccaccacttctgttcatgaaagcaacaaaaacatacagacattttccacagccagcgtaggaacagctcctccaaatatgggggcttcctttgggagcccaacgtttagctcaactgttccaagcacagcctctccaatgaacacagtcccgccgccaccaattcctccaattccagcgatgccatctctgccaccaatgccatccattcccccaattccagttcctcctccagtacctacattgcctcctgtgcctcctgtgcccccgattcccccagttccttctgtgccacccatgaccccactgccacccatgtcgggcatgccgcccttgaatccgccacctgtggcacctctacctgctggaatgaatggctctggagcacctatgaatttgaacaataatctgaatcctatgtttcttggtccgttgaatcctgttaaccctatccagatgaactctcagagcagtgtgaagccactccccatcaaccctgatgatctgtatgtcagtgtgcatggaatgcccttttctgcaatggaaaatgatgtcagagatttttttcatgggctccgtgttgatgcagtgcatttgttgaaagatcatgtaggtcgaaataatgggaatggattggttaagtttctctcccctcaagatacatttgaagctttgaaacgaaacagaatgctgatgattcaacgctatgtggaagttagccctgccacagaaagacagtgggtagctgctggaggccatatcacttttaagcaaaatatgggaccttctggacaaactcatccccctcctcagacacttcccaggtcaaaatcgcccagtgggcagaaaagatcaaggtcaagatcaccacatgaggctggtttttgtgtttacttgaaagggctaccatttgaagcagaaaacaaacatgtcattgatttttttaaaaagctggatattgtggaagatagtatttatatagcttatggacccaatgggaaagcaactggcgaaggctttgtagagttcagaaatgaggctgactataaggctgctctgtgtcgtcataaacagtacatgggcaatcgctttattcaagttcatccaattactaagaaaggtatgctagaaaagatagatatgattcgaaaaagactgcagaacttcagctatgaccagagggaaatgatactaaatccagagggggatgtcaactctgccaaagtctgtgcccacataacaaatattccattcagcattacaaagatggatgttcttcagttcctagaaggaatcccagtggatgaaaatgctgtacatgttcttgttgataacaatgggcaaggtctaggacaggcattggttcagtttaaaaatgaagatgatgcacgtaagtctgaacgcttacaccgtaaaaaacttaatgggagagaagcttttgttcatgtagttaccctagaagatatgagagagattgagaaaaatccccctgcccaaggaaaaaagggattaaagatgcctgtgccaggtaatcctgcagttccaggaatgcccaatgcgggactgcccggtgtgggactgcccagtgcaggacttcccggtgcaggcctgcccagcacaggactgcctggttcagcaataaccagtgcaggactgcctggtgcgggaatgcccagtgcaggaatacctagtgcaggaggtgaagagcatgccttcctgactgtaggatcaaaggaagccaataatgggcctccatttaactttcctggtaattttggtggatcaaatgcctttgggccaccaatccctcctccaggattaggaggcggggcctttggtgatgctaggcctggtatgccttcagttggaaacagtggtttgcctggtctaggactggatgttccgggttttggaggtggaccaaacaatttaagtgggccatcgggatttggagggggccctcagaattttggaaatggccctggtagcttaggcggtcccccggggtttggaagtggccctcctggtcttggaagtgcccctgggcatttgggtgggccaccagcttttgggcctggccccggccccggccccggccctggcccaatccatattggtggtccccctggctttgcatctagttctggaaaaccaggaccgacagtaattaaagtgcaaaacatgccctttactgtgtctattgatgagattttagatttcttttatggctatcaagtaatcccaggctcagtgtgtttaaaatacaatgaaaaaggtatgcccacaggtgaagccatggtggcctttgagtctcgggatgaagccacagctgctgtcattgacttaaatgacaggcctataggttcaagaaaagtaaaacttgtattagggtagccattcacatcattttttatagggtagatcttcatattgctgtgattaatgcatccagattgttttcctagtatttccaggttagaacctgtggattgtttcaattgcatatagcttggtttccataacatagagcattggttgactgtttacagaagactcactcaccaggataaacattgctgtatgttacagtaaagctatctggagagaacacataaatgattttggcataccattagagaaaccatttgtaaaactcaaatgaccacataaagcttatcaaggagtctagattggttttgttttataccatatgggatgaagaaaatagaaatgtcagtagaactcattgagggtgctcttgccagctgctgaaaatagaagttggctactctcagaatttggtttaaagctggacagatttgctttgttatagggtaaagctttgtctaaagtcctcattttcttttaaaattgaataaaatttctgtatacagattcattgtatgtacctttattgcttcttaagggtccttgctgtatagacagtcctgcttcagaagttgctgctttgtttgtctaattgactcatttgtaaatgagcagaactgttttgttggtttttttccctaaatataaaagtccacacttcgtttgtgctataacctcaaactttgatttctaatgtcacacttaaaactgtgtggaataagacttttgccataaaaataaactatggagtcctttatctaccagagcctttttggtttgaccgccacgatttaggttagtcagtttaaaaattgttcatgttgtttggatggtatcgaaaaccagaaaccacttttaataatgtgtttaagatacttgatttgaagtccttttcatatggactaattgtagtatcaatttcctcctgtcccgattatgtgaaattttggcctttaaacaaagaggggcccattcataagaaagtgttatatctaggtttttaaaactgaagttgaaattatctttgttagcagtagtagtatagaataaaagatccgtatgctggttcgtagattgatacgtgttagtcctgttatttggaggctttttggcatagttgttcgatcaggagcctgtttactaaaagtcttcatacagagtacaagtgcagccgccagaggagaaaattgagattcttgaccctttcatactcttttctttggtattcaggacactaaggcaggaggaccacatgagttctggttggtaagtgtccttgtcatgaaaacacttgccttacaaggctctaattatgatttccctagtcagtgctctgaagatgtgtcacattatattataaacaatacggaaggggagataggtgagatgatatgaaaaacaaattttctcactgtcataaaaggctctaattatggttactttccttgtgatgaaaaacttggccttacagggctctagttatggttactttccctagtcaatgctctgaaaatgtgtcacattataaacaatacagaaggagagatagatgagagatcatgaaaaccaaattttatcttttacatggcccctttgtcttcgtttgaaacatccccaacatttcctacaaatcagcgtagttacaaaggggtcagtcttttaaaataagtatttcctattaaactatatatatatacagtgcctttttggtgttgtgagtcagtggaacactgaaatacagcggttgtgtaatttaagagtggcaacagtttcatttgataagatttgaaaaggctttttatcactacaatcttagaggattgacagtacaggatttttgtttaagagaaggattgtttagactcaagaggtgactatgttgtgggtcttttgataattcatgaatacagatttgctttgaccgatcactagatactgcctcctcaatttcaaaagcaatataacgtttgtatatgctgtttaatttaagttaatgttaagtaatcatttctcattccaaagacaatgcaaaaaacttcagcactgcttgagagttgtatttcagccacagatattttctccattggaaagctattttcattttagaaaaatgggttgtttgaagatgaaagtcttttatcttttttcacaatttattttggttatatgttcgtacattcttattaaatatttcatacactttattgc

SEQ ID NO: 9740 - protein, 932 aa, Homo sapiens; identical to SEQ ID NO: 1239

SEQ ID NO: 9741 - DNA, 4676 bp, Homo sapiens
gtgaagcggcgaaggaggtggtggctgcgttgggctccgggaagccgttcgggctggggctgtcggccgcggggcggaggcactcgcgcggggggtaattcggggtctgggttctggtgccgcgcagctttccccgcgtaggaacagctcctccaaatatgggggcttcctttgggagcccaacgtttagctcaactgttccaagcacagcctctccaatgaacacagtcccgccgccaccaattcctccaattccagcgatgccatctctgccaccaatgccatccattcccccaattccagttcctcctccagtacctacattgcctcctgtgcctcctgtgcccccgattcccccagttccttctgtgccacccatgaccccactgccacccatgtcgggcatgccgcccttgaatccgccacctgtggcacctctacctgctggaatgaatggctctggagcacctatgaatttgaacaataatctgaatcctatgtttcttggtccgttgaatcctgttaaccctatccagatgaactctcagagcagtgtgaagccactccccatcaaccctgatgatctgtatgtcagtgtgcatggaatgcccttttctgcaatggaaaatgatgtcagagatttttttcatgggctccgtgttgatgcagtgcatttgttgaaagatcatgtaggtcgaaataatgggaatggattggttaagtttctctcccctcaagatacatttgaagctttgaaacgaaacagaatgctgatgattcaacgctatgtggaagttagccctgccacagaaagacagtgggtagctgctggaggccatatcacttttaagcaaaatatgggaccttctggacaaactcatccccctcctcagacacttcccaggtcaaaatcgcccagtgggcagaaaagatcaaggtcaagatcaccacatgaggctggtttttgtgtttacttgaaagggctaccatttgaagcagaaaacaaacatgtcattgatttttttaaaaagctggatattgtggaagatagtatttatatagcttatggacccaatgggaaagcaactggcgaaggctttgtagagttcagaaatgaggctgactataaggctgctctgtgtcgtcataaacagtacatgggcaatcgctttattcaagttcatccaattactaagaaaggtatgctagaaaagatagatatgattcgaaaaagactgcagaacttcagctatgaccagagggaaatgatactaaatccagagggggatgtcaactctgccaaagtctgtgcccacataacaaatattccattcagcattacaaagatggatgttcttcagttcctagaaggaatcccagtggatgaaaatgctgtacatgttcttgttgataacaatgggcaaggtctaggacaggcattggttcagtttaaaaatgaagatgatgcacgtaagtctgaacgcttacaccgtaaaaaacttaatgggagagaagcttttgttcatgtagttaccctagaagatatgagagagattgagaaaaatccccctgcccaaggaaaaaagggattaaagatgcctgtgccaggtaatcctgcagttccaggaatgcccaatgcgggactgcccggtgtgggactgcccagtgcaggacttcccggtgcaggcctgcccagcacaggactgcctggttcagcaataaccagtgcaggactgcctggtgcgggaatgcccagtgcaggaatacctagtgcaggaggtgaagagcatgccttcctgactgtaggatcaaaggaagccaataatgggcctccatttaactttcctggtaattttggtggatcaaatgcctttgggccaccaatccctcctccaggattaggaggcggggcctttggtgatgctaggcctggtatgccttcagttggaaacagtggtttgcctggtctaggactggatgttccgggttttggaggtggaccaaacaatttaagtgggccatcgggatttggagggggccctcagaattttggaaatggccctggtagcttaggcggtcccccggggtttggaagtggccctcctggtcttggaagtgcccctgggcatttgggtgggccaccagcttttgggcctggccccggccccggccccggccctggcccaatccatattggtggtccccctggctttgcatctagttctggaaaaccaggaccgacagtaattaaagtgcaaaacatgccctttactgtgtctattgatgagattttagatttcttttatggctatcaagtaatcccaggctcagtgtgtttaaaatacaatgaaaaaggtatgcccacaggtgaagccatggtggcctttgagtctcgggatgaagccacagctgctgtcattgacttaaatgacaggcctataggttcaagaaaagtaaaacttgtattagggtagccattcacatcattttttatagggtagatcttcatattgctgtgattaatgcatccagattgttttcctagtatttccaggttagaacctgtggattgtttcaattgcatatagcttggtttccataacatagagcattggttgactgtttacagaagactcactcaccaggataaacattgctgtatgttacagtaaagctatctggagagaacacataaatgattttggcataccattagagaaaccatttgtaaaactcaaatgaccacataaagcttatcaaggagtctagattggttttgttttataccatatgggatgaagaaaatagaaatgtcagtagaactcattgagggtgctcttgccagctgctgaaaatagaagttggctactctcagaatttggtttaaagctggacagatttgctttgttatagggtaaagctttgtctaaagtcctcattttcttttaaaattgaataaaatttctgtatacagattcattgtatgtacctttattgcttcttaagggtccttgctgtatagacagtcctgcttcagaagttgctgctttgtttgtctaattgactcatttgtaaatgagcagaactgttttgttggtttttttccctaaatataaaagtccacacttcgtttgtgctataacctcaaactttgatttctaatgtcacacttaaaactgtgtggaataagacttttgccataaaaataaactatggagtcctttatctaccagagcctttttggtttgaccgccacgatttaggttagtcagtttaaaaattgttcatgttgtttggatggtatcgaaaaccagaaaccacttttaataatgtgtttaagatacttgatttgaagtccttttcatatggactaattgtagtatcaatttcctcctgtcccgattatgtgaaattttggcctttaaacaaagaggggcccattcataagaaagtgttatatctaggtttttaaaactgaagttgaaattatctttgttagcagtagtagtatagaataaaagatccgtatgctggttcgtagattgatacgtgttagtcctgttatttggaggctttttggcatagttgttcgatcaggagcctgtttactaaaagtcttcatacagagtacaagtgcagccgccagaggagaaaattgagattcttgaccctttcatactcttttctttggtattcaggacactaaggcaggaggaccacatgagttctggttggtaagtgtccttgtcatgaaaacacttgccttacaaggctctaattatgatttccctagtcagtgctctgaagatgtgtcacattatattataaacaatacggaaggggagataggtgagatgatatgaaaaacaaattttctcactgtcataaaaggctctaattatggttactttccttgtgatgaaaaacttggccttacagggctctagttatggttactttccctagtcaatgctctgaaaatgtgtcacattataaacaatacagaaggagagatagatgagagatcatgaaaaccaaattttatcttttacatggcccctttgtcttcgtttgaaacatccccaacatttcctacaaatcagcgtagttacaaaggggtcagtcttttaaaataagtatttcctattaaactatatatatatacagtgcctttttggtgttgtgagtcagtggaacactgaaatacagcggttgtgtaatttaagagtggcaacagtttcatttgataagatttgaaaaggctttttatcactacaatcttagaggattgacagtacaggatttttgtttaagagaaggattgtttagactcaagaggtgactatgttgtgggtcttttgataattcatgaatacagatttgctttgaccgatcactagatactgcctcctcaatttcaaaagcaatataacgtttgtatatgctgtttaatttaagttaatgttaagtaatcatttctcattccaaagacaatgcaaaaaacttcagcactgcttgagagttgtatttcagccacagatattttctccattggaaagctattttcattttagaaaaatgggttgtttgaagatgaaagtcttttatcttttttcacaatttattttggttatatgttcgtacattcttattaaatatttcatacactttattgc

SEQ ID NO: 9742 - protein, 771 aa, Homo sapiens; identical to SEQ ID NO: 9686

SEQ ID NO: 9743 - DNA, 4710 bp, Homo sapiens
gtgaagcggcgaaggaggtggtggctgcgttgggctccgggaagccgttcgggctggggctgtcggccgcggggcggaggcactcgcgcggggggtaattcggggtctgggttctggtgccgcgcagctttccccgtctaaaagttggttttaattggttgcccacaggattgacttggcctctacttcttgttaaggaaattcatctcttgttttatcaggtgtgtgtgtgttccaagcacagcctctccaatgaacacagtcccgccgccaccaattcctccaattccagcgatgccatctctgccaccaatgccatccattcccccaattccagttcctcctccagtacctacattgcctcctgtgcctcctgtgcccccgattcccccagttccttctgtgccacccatgaccccactgccacccatgtcgggcatgccgcccttgaatccgccacctgtggcacctctacctgctggaatgaatggctctggagcacctatgaatttgaacaataatctgaatcctatgtttcttggtccgttgaatcctgttaaccctatccagatgaactctcagagcagtgtgaagccactccccatcaaccctgatgatctgtatgtcagtgtgcatggaatgcccttttctgcaatggaaaatgatgtcagagatttttttcatgggctccgtgttgatgcagtgcatttgttgaaagatcatgtaggtcgaaataatgggaatggattggttaagtttctctcccctcaagatacatttgaagctttgaaacgaaacagaatgctgatgattcaacgctatgtggaagttagccctgccacagaaagacagtgggtagctgctggaggccatatcacttttaagcaaaatatgggaccttctggacaaactcatccccctcctcagacacttcccaggtcaaaatcgcccagtgggcagaaaagatcaaggtcaagatcaccacatgaggctggtttttgtgtttacttgaaagggctaccatttgaagcagaaaacaaacatgtcattgatttttttaaaaagctggatattgtggaagatagtatttatatagcttatggacccaatgggaaagcaactggcgaaggctttgtagagttcagaaatgaggctgactataaggctgctctgtgtcgtcataaacagtacatgggcaatcgctttattcaagttcatccaattactaagaaaggtatgctagaaaagatagatatgattcgaaaaagactgcagaacttcagctatgaccagagggaaatgatactaaatccagagggggatgtcaactctgccaaagtctgtgcccacataacaaatattccattcagcattacaaagatggatgttcttcagttcctagaaggaatcccagtggatgaaaatgctgtacatgttcttgttgataacaatgggcaaggtctaggacaggcattggttcagtttaaaaatgaagatgatgcacgtaagtctgaacgcttacaccgtaaaaaacttaatgggagagaagcttttgttcatgtagttaccctagaagatatgagagagattgagaaaaatccccctgcccaaggaaaaaagggattaaagatgcctgtgccaggtaatcctgcagttccaggaatgcccaatgcgggactgcccggtgtgggactgcccagtgcaggacttcccggtgcaggcctgcccagcacaggactgcctggttcagcaataaccagtgcaggactgcctggtgcgggaatgcccagtgcaggaatacctagtgcaggaggtgaagagcatgccttcctgactgtaggatcaaaggaagccaataatgggcctccatttaactttcctggtaattttggtggatcaaatgcctttgggccaccaatccctcctccaggattaggaggcggggcctttggtgatgctaggcctggtatgccttcagttggaaacagtggtttgcctggtctaggactggatgttccgggttttggaggtggaccaaacaatttaagtgggccatcgggatttggagggggccctcagaattttggaaatggccctggtagcttaggcggtcccccggggtttggaagtggccctcctggtcttggaagtgcccctgggcatttgggtgggccaccagcttttgggcctggccccggccccggccccggccctggcccaatccatattggtggtccccctggctttgcatctagttctggaaaaccaggaccgacagtaattaaagtgcaaaacatgccctttactgtgtctattgatgagattttagatttcttttatggctatcaagtaatcccaggctcagtgtgtttaaaatacaatgaaaaaggtatgcccacaggtgaagccatggtggcctttgagtctcgggatgaagccacagctgctgtcattgacttaaatgacaggcctataggttcaagaaaagtaaaacttgtattagggtagccattcacatcattttttatagggtagatcttcatattgctgtgattaatgcatccagattgttttcctagtatttccaggttagaacctgtggattgtttcaattgcatatagcttggtttccataacatagagcattggttgactgtttacagaagactcactcaccaggataaacattgctgtatgttacagtaaagctatctggagagaacacataaatgattttggcataccattagagaaaccatttgtaaaactcaaatgaccacataaagcttatcaaggagtctagattggttttgttttataccatatgggatgaagaaaatagaaatgtcagtagaactcattgagggtgctcttgccagctgctgaaaatagaagttggctactctcagaatttggtttaaagctggacagatttgctttgttatagggtaaagctttgtctaaagtcctcattttcttttaaaattgaataaaatttctgtatacagattcattgtatgtacctttattgcttcttaagggtccttgctgtatagacagtcctgcttcagaagttgctgctttgtttgtctaattgactcatttgtaaatgagcagaactgttttgttggtttttttccctaaatataaaagtccacacttcgtttgtgctataacctcaaactttgatttctaatgtcacacttaaaactgtgtggaataagacttttgccataaaaataaactatggagtcctttatctaccagagcctttttggtttgaccgccacgatttaggttagtcagtttaaaaattgttcatgttgtttggatggtatcgaaaaccagaaaccacttttaataatgtgtttaagatacttgatttgaagtccttttcatatggactaattgtagtatcaatttcctcctgtcccgattatgtgaaattttggcctttaaacaaagaggggcccattcataagaaagtgttatatctaggtttttaaaactgaagttgaaattatctttgttagcagtagtagtatagaataaaagatccgtatgctggttcgtagattgatacgtgttagtcctgttatttggaggctttttggcatagttgttcgatcaggagcctgtttactaaaagtcttcatacagagtacaagtgcagccgccagaggagaaaattgagattcttgaccctttcatactcttttctttggtattcaggacactaaggcaggaggaccacatgagttctggttggtaagtgtccttgtcatgaaaacacttgccttacaaggctctaattatgatttccctagtcagtgctctgaagatgtgtcacattatattataaacaatacggaaggggagataggtgagatgatatgaaaaacaaattttctcactgtcataaaaggctctaattatggttactttccttgtgatgaaaaacttggccttacagggctctagttatggttactttccctagtcaatgctctgaaaatgtgtcacattataaacaatacagaaggagagatagatgagagatcatgaaaaccaaattttatcttttacatggcccctttgtcttcgtttgaaacatccccaacatttcctacaaatcagcgtagttacaaaggggtcagtcttttaaaataagtatttcctattaaactatatatatatacagtgcctttttggtgttgtgagtcagtggaacactgaaatacagcggttgtgtaatttaagagtggcaacagtttcatttgataagatttgaaaaggctttttatcactacaatcttagaggattgacagtacaggatttttgtttaagagaaggattgtttagactcaagaggtgactatgttgtgggtcttttgataattcatgaatacagatttgctttgaccgatcactagatactgcctcctcaatttcaaaagcaatataacgtttgtatatgctgtttaatttaagttaatgttaagtaatcatttctcattccaaagacaatgcaaaaaacttcagcactgcttgagagttgtatttcagccacagatattttctccattggaaagctattttcattttagaaaaatgggttgtttgaagatgaaagtcttttatcttttttcacaatttattttggttatatgttcgtacattcttattaaatatttcatacactttattgc

SEQ ID NO: 9744 - protein, 751 aa, Homo sapiens; identical to SEQ ID NO: 9694

SEQ ID NO: 9745 - DNA, 4616 bp, Homo sapiens
gtgaagcggcgaaggaggtggtggctgcgttgggctccgggaagccgttcgggctggggctgtcggccgcggggcggaggcactcgcgcggggggtaattcggggtctgggttctggtgccgcgcagctttccccgtctaaaagttggttttaattggttgcccacaggattgacttggcctctacttcttgttaaggaaattcatcttctgccaccaatgccatccattcccccaattccagttcctcctccagtacctacattgcctcctgtgcctcctgtgcccccgattcccccagttccttctgtgccacccatgaccccactgccacccatgtcgggcatgccgcccttgaatccgccacctgtggcacctctacctgctggaatgaatggctctggagcacctatgaatttgaacaataatctgaatcctatgtttcttggtccgttgaatcctgttaaccctatccagatgaactctcagagcagtgtgaagccactccccatcaaccctgatgatctgtatgtcagtgtgcatggaatgcccttttctgcaatggaaaatgatgtcagagatttttttcatgggctccgtgttgatgcagtgcatttgttgaaagatcatgtaggtcgaaataatgggaatggattggttaagtttctctcccctcaagatacatttgaagctttgaaacgaaacagaatgctgatgattcaacgctatgtggaagttagccctgccacagaaagacagtgggtagctgctggaggccatatcacttttaagcaaaatatgggaccttctggacaaactcatccccctcctcagacacttcccaggtcaaaatcgcccagtgggcagaaaagatcaaggtcaagatcaccacatgaggctggtttttgtgtttacttgaaagggctaccatttgaagcagaaaacaaacatgtcattgatttttttaaaaagctggatattgtggaagatagtatttatatagcttatggacccaatgggaaagcaactggcgaaggctttgtagagttcagaaatgaggctgactataaggctgctctgtgtcgtcataaacagtacatgggcaatcgctttattcaagttcatccaattactaagaaaggtatgctagaaaagatagatatgattcgaaaaagactgcagaacttcagctatgaccagagggaaatgatactaaatccagagggggatgtcaactctgccaaagtctgtgcccacataacaaatattccattcagcattacaaagatggatgttcttcagttcctagaaggaatcccagtggatgaaaatgctgtacatgttcttgttgataacaatgggcaaggtctaggacaggcattggttcagtttaaaaatgaagatgatgcacgtaagtctgaacgcttacaccgtaaaaaacttaatgggagagaagcttttgttcatgtagttaccctagaagatatgagagagattgagaaaaatccccctgcccaaggaaaaaagggattaaagatgcctgtgccaggtaatcctgcagttccaggaatgcccaatgcgggactgcccggtgtgggactgcccagtgcaggacttcccggtgcaggcctgcccagcacaggactgcctggttcagcaataaccagtgcaggactgcctggtgcgggaatgcccagtgcaggaatacctagtgcaggaggtgaagagcatgccttcctgactgtaggatcaaaggaagccaataatgggcctccatttaactttcctggtaattttggtggatcaaatgcctttgggccaccaatccctcctccaggattaggaggcggggcctttggtgatgctaggcctggtatgccttcagttggaaacagtggtttgcctggtctaggactggatgttccgggttttggaggtggaccaaacaatttaagtgggccatcgggatttggagggggccctcagaattttggaaatggccctggtagcttaggcggtcccccggggtttggaagtggccctcctggtcttggaagtgcccctgggcatttgggtgggccaccagcttttgggcctggccccggccccggccccggccctggcccaatccatattggtggtccccctggctttgcatctagttctggaaaaccaggaccgacagtaattaaagtgcaaaacatgccctttactgtgtctattgatgagattttagatttcttttatggctatcaagtaatcccaggctcagtgtgtttaaaatacaatgaaaaaggtatgcccacaggtgaagccatggtggcctttgagtctcgggatgaagccacagctgctgtcattgacttaaatgacaggcctataggttcaagaaaagtaaaacttgtattagggtagccattcacatcattttttatagggtagatcttcatattgctgtgattaatgcatccagattgttttcctagtatttccaggttagaacctgtggattgtttcaattgcatatagcttggtttccataacatagagcattggttgactgtttacagaagactcactcaccaggataaacattgctgtatgttacagtaaagctatctggagagaacacataaatgattttggcataccattagagaaaccatttgtaaaactcaaatgaccacataaagcttatcaaggagtctagattggttttgttttataccatatgggatgaagaaaatagaaatgtcagtagaactcattgagggtgctcttgccagctgctgaaaatagaagttggctactctcagaatttggtttaaagctggacagatttgctttgttatagggtaaagctttgtctaaagtcctcattttcttttaaaattgaataaaatttctgtatacagattcattgtatgtacctttattgcttcttaagggtccttgctgtatagacagtcctgcttcagaagttgctgctttgtttgtctaattgactcatttgtaaatgagcagaactgttttgttggtttttttccctaaatataaaagtccacacttcgtttgtgctataacctcaaactttgatttctaatgtcacacttaaaactgtgtggaataagacttttgccataaaaataaactatggagtcctttatctaccagagcctttttggtttgaccgccacgatttaggttagtcagtttaaaaattgttcatgttgtttggatggtatcgaaaaccagaaaccacttttaataatgtgtttaagatacttgatttgaagtccttttcatatggactaattgtagtatcaatttcctcctgtcccgattatgtgaaattttggcctttaaacaaagaggggcccattcataagaaagtgttatatctaggtttttaaaactgaagttgaaattatctttgttagcagtagtagtatagaataaaagatccgtatgctggttcgtagattgatacgtgttagtcctgttatttggaggctttttggcatagttgttcgatcaggagcctgtttactaaaagtcttcatacagagtacaagtgcagccgccagaggagaaaattgagattcttgaccctttcatactcttttctttggtattcaggacactaaggcaggaggaccacatgagttctggttggtaagtgtccttgtcatgaaaacacttgccttacaaggctctaattatgatttccctagtcagtgctctgaagatgtgtcacattatattataaacaatacggaaggggagataggtgagatgatatgaaaaacaaattttctcactgtcataaaaggctctaattatggttactttccttgtgatgaaaaacttggccttacagggctctagttatggttactttccctagtcaatgctctgaaaatgtgtcacattataaacaatacagaaggagagatagatgagagatcatgaaaaccaaattttatcttttacatggcccctttgtcttcgtttgaaacatccccaacatttcctacaaatcagcgtagttacaaaggggtcagtcttttaaaataagtatttcctattaaactatatatatatacagtgcctttttggtgttgtgagtcagtggaacactgaaatacagcggttgtgtaatttaagagtggcaacagtttcatttgataagatttgaaaaggctttttatcactacaatcttagaggattgacagtacaggatttttgtttaagagaaggattgtttagactcaagaggtgactatgttgtgggtcttttgataattcatgaatacagatttgctttgaccgatcactagatactgcctcctcaatttcaaaagcaatataacgtttgtatatgctgtttaatttaagttaatgttaagtaatcatttctcattccaaagacaatgcaaaaaacttcagcactgcttgagagttgtatttcagccacagatattttctccattggaaagctattttcattttagaaaaatgggttgtttgaagatgaaagtcttttatcttttttcacaatttattttggttatatgttcgtacattcttattaaatatttcatacactttattgc

SEQ ID NO: 9746 - protein, 731 aa, Homo sapiens; identical to SEQ ID NO: 9692

SEQ ID NO: 9747 - DNA, 5101 bp, Homo sapiens
gtgaagcggcgaaggaggtggtggctgcgttgggctccgggaagccgttcgggctggggctgtcggccgcggggcggaggcactcgcgcggggggtaattcggggtctgggttctggtgccgcgcagctttccccgtctaaaagttggttttaattggttgcccacaggattgacttggccattcctgatgggggcgtgcatattgtagggggtgaactgggtgaggctttcatcgtttttgccactgatgaagatgcaaggcttggtatgatgcgcacaggtggtacaattaaagggtcaaaagtaacactattgttgagtagtaagacggaaatgcagaatatgattgaactgagtcgtaggcgttttgaaactgccaacttagatataccaccagcaaatgccagtagatcaggaccaccacctagctcaggaatgagtagcagggtaaacttgcccacaacagtatccaactttaataatccatcacccagtgtagttactgccaccacttctgttcatgaaagcaacaaaaacatacagacattttccacagccagcgtaggaacagctcctccaaatatgggggcttcctttgggagcccaacgtttagctcaactgttccaagcacagcctctccaatgaacacagtcccgccgccaccaattcctccaattccagcgatgccatctctgccaccaatgccatccattcccccaattccagttcctcctccagtacctacattgcctcctgtgcctcctgtgcccccgattcccccagttccttctgtgccacccatgaccccactgccacccatgtcgggcatgccgcccttgaatccgccacctgtggcacctctacctgctggaatgaatggctctggagcacctatgaatttgaacaataatctgaatcctatgtttcttggtccgttgaatcctgttaaccctatccagatgaactctcagagcagtgtgaagccactccccatcaaccctgatgatctgtatgtcagtgtgcatggaatgcccttttctgcaatggaaaatgatgtcagagatttttttcatgggctccgtgttgatgcagtgcatttgttgaaagatcatgtaggtcgaaataatgggaatggattggttaagtttctctcccctcaagatacatttgaagctttgaaacgaaacagaatgctgatgattcaacgctatgtggaagttagccctgccacagaaagacagtgggtagctgctggaggccatatcacttttaagcaaaatatgggaccttctggacaaactcatccccctcctcagacacttcccaggtcaaaatcgcccagtgggcagaaaagatcaaggtcaagatcaccacatgaggctggtttttgtgtttacttgaaagggctaccatttgaagcagaaaacaaacatgtcattgatttttttaaaaagctggatattgtggaagatagtatttatatagcttatggacccaatgggaaagcaactggcgaaggctttgtagagttcagaaatgaggctgactataaggctgctctgtgtcgtcataaacagtacatgggcaatcgctttattcaagttcatccaattactaagaaaggtatgctagaaaagatagatatgattcgaaaaagactgcagaacttcagctatgaccagagggaaatgatactaaatccagagggggatgtcaactctgccaaagtctgtgcccacataacaaatattccattcagcattacaaagatggatgttcttcagttcctagaaggaatcccagtggatgaaaatgctgtacatgttcttgttgataacaatgggcaaggtctaggacaggcattggttcagtttaaaaatgaagatgatgcacgtaagtctgaacgcttacaccgtaaaaaacttaatgggagagaagcttttgttcatgtagttaccctagaagatatgagagagattgagaaaaatccccctgcccaaggaaaaaagggattaaagatgcctgtgccaggtaatcctgcagttccaggaatgcccaatgcgggactgcccggtgtgggactgcccagtgcaggacttcccggtgcaggcctgcccagcacaggactgcctggttcagcaataaccagtgcaggactgcctggtgcgggaatgcccagtgcaggaatacctagtgcaggaggtgaagagcatgccttcctgactgtaggatcaaaggaagccaataatgggcctccatttaactttcctggtaattttggtggatcaaatgcctttgggccaccaatccctcctccaggattaggaggcggggcctttggtgatgctaggcctggtatgccttcagttggaaacagtggtttgcctggtctaggactggatgttccgggttttggaggtggaccaaacaatttaagtgggccatcgggatttggagggggccctcagaattttggaaatggccctggtagcttaggcggtcccccggggtttggaagtggccctcctggtcttggaagtgcccctgggcatttgggtgggccaccagcttttgggcctggccccggccccggccccggccctggcccaatccatattggtggtccccctggctttgcatctagttctggaaaaccaggaccgacagtaattaaagtgcaaaacatgccctttactgtgtctattgatgagattttagatttcttttatggctatcaagtaatcccaggctcagtgtgtttaaaatacaatgaaaaaggtatgcccacaggtgaagccatggtggcctttgagtctcgggatgaagccacagctgctgtcattgacttaaatgacaggcctataggttcaagaaaagtaaaacttgtattagggtagccattcacatcattttttatagggtagatcttcatattgctgtgattaatgcatccagattgttttcctagtatttccaggttagaacctgtggattgtttcaattgcatatagcttggtttccataacatagagcattggttgactgtttacagaagactcactcaccaggataaacattgctgtatgttacagtaaagctatctggagagaacacataaatgattttggcataccattagagaaaccatttgtaaaactcaaatgaccacataaagcttatcaaggagtctagattggttttgttttataccatatgggatgaagaaaatagaaatgtcagtagaactcattgagggtgctcttgccagctgctgaaaatagaagttggctactctcagaatttggtttaaagctggacagatttgctttgttatagggtaaagctttgtctaaagtcctcattttcttttaaaattgaataaaatttctgtatacagattcattgtatgtacctttattgcttcttaagggtccttgctgtatagacagtcctgcttcagaagttgctgctttgtttgtctaattgactcatttgtaaatgagcagaactgttttgttggtttttttccctaaatataaaagtccacacttcgtttgtgctataacctcaaactttgatttctaatgtcacacttaaaactgtgtggaataagacttttgccataaaaataaactatggagtcctttatctaccagagcctttttggtttgaccgccacgatttaggttagtcagtttaaaaattgttcatgttgtttggatggtatcgaaaaccagaaaccacttttaataatgtgtttaagatacttgatttgaagtccttttcatatggactaattgtagtatcaatttcctcctgtcccgattatgtgaaattttggcctttaaacaaagaggggcccattcataagaaagtgttatatctaggtttttaaaactgaagttgaaattatctttgttagcagtagtagtatagaataaaagatccgtatgctggttcgtagattgatacgtgttagtcctgttatttggaggctttttggcatagttgttcgatcaggagcctgtttactaaaagtcttcatacagagtacaagtgcagccgccagaggagaaaattgagattcttgaccctttcatactcttttctttggtattcaggacactaaggcaggaggaccacatgagttctggttggtaagtgtccttgtcatgaaaacacttgccttacaaggctctaattatgatttccctagtcagtgctctgaagatgtgtcacattatattataaacaatacggaaggggagataggtgagatgatatgaaaaacaaattttctcactgtcataaaaggctctaattatggttactttccttgtgatgaaaaacttggccttacagggctctagttatggttactttccctagtcaatgctctgaaaatgtgtcacattataaacaatacagaaggagagatagatgagagatcatgaaaaccaaattttatcttttacatggcccctttgtcttcgtttgaaacatccccaacatttcctacaaatcagcgtagttacaaaggggtcagtcttttaaaataagtatttcctattaaactatatatatatacagtgcctttttggtgttgtgagtcagtggaacactgaaatacagcggttgtgtaatttaagagtggcaacagtttcatttgataagatttgaaaaggctttttatcactacaatcttagaggattgacagtacaggatttttgtttaagagaaggattgtttagactcaagaggtgactatgttgtgggtcttttgataattcatgaatacagatttgctttgaccgatcactagatactgcctcctcaatttcaaaagcaatataacgtttgtatatgctgtttaatttaagttaatgttaagtaatcatttctcattccaaagacaatgcaaaaaacttcagcactgcttgagagttgtatttcagccacagatattttctccattggaaagctattttcattttagaaaaatgggttgtttgaagatgaaagtcttttatcttttttcacaatttattttggttatatgttcgtacattcttattaaatatttcatacactttattgc

SEQ ID NO: 9748 - protein, 876 aa, Homo sapiens; identical to SEQ ID NO: 9688

SEQ ID NO: 9749 - DNA, 4785 bp, Homo sapiens
gtgaagcggcgaaggaggtggtggctgcgttgggctccgggaagccgttcgggctggggctgtcggccgcggggcggaggcactcgcgcggggggtaattcggggtctgggttctggtgccgcgcagctttccccgtctaaaagttggttttaattggttgcccacaggattgacttggcctctacttcttgttaaggaaattcatctcttgttttatcaggtgtgtgtggtttcagcgcaccagcgtaggaacagctcctccaaatatgggggcttcctttgggagcccaacgtttagctcaactgttccaagcacagcctctccaatgaacacagtcccgccgccaccaattcctccaattccagcgatgccatctctgccaccaatgccatccattcccccaattccagttcctcctccagtacctacattgcctcctgtgcctcctgtgcccccgattcccccagttccttctgtgccacccatgaccccactgccacccatgtcgggcatgccgcccttgaatccgccacctgtggcacctctacctgctggaatgaatggctctggagcacctatgaatttgaacaataatctgaatcctatgtttcttggtccgttgaatcctgttaaccctatccagatgaactctcagagcagtgtgaagccactccccatcaaccctgatgatctgtatgtcagtgtgcatggaatgcccttttctgcaatggaaaatgatgtcagagatttttttcatgggctccgtgttgatgcagtgcatttgttgaaagatcatgtaggtcgaaataatgggaatggattggttaagtttctctcccctcaagatacatttgaagctttgaaacgaaacagaatgctgatgattcaacgctatgtggaagttagccctgccacagaaagacagtgggtagctgctggaggccatatcacttttaagcaaaatatgggaccttctggacaaactcatccccctcctcagacacttcccaggtcaaaatcgcccagtgggcagaaaagatcaaggtcaagatcaccacatgaggctggtttttgtgtttacttgaaagggctaccatttgaagcagaaaacaaacatgtcattgatttttttaaaaagctggatattgtggaagatagtatttatatagcttatggacccaatgggaaagcaactggcgaaggctttgtagagttcagaaatgaggctgactataaggctgctctgtgtcgtcataaacagtacatgggcaatcgctttattcaagttcatccaattactaagaaaggtatgctagaaaagatagatatgattcgaaaaagactgcagaacttcagctatgaccagagggaaatgatactaaatccagagggggatgtcaactctgccaaagtctgtgcccacataacaaatattccattcagcattacaaagatggatgttcttcagttcctagaaggaatcccagtggatgaaaatgctgtacatgttcttgttgataacaatgggcaaggtctaggacaggcattggttcagtttaaaaatgaagatgatgcacgtaagtctgaacgcttacaccgtaaaaaacttaatgggagagaagcttttgttcatgtagttaccctagaagatatgagagagattgagaaaaatccccctgcccaaggaaaaaagggattaaagatgcctgtgccaggtaatcctgcagttccaggaatgcccaatgcgggactgcccggtgtgggactgcccagtgcaggacttcccggtgcaggcctgcccagcacaggactgcctggttcagcaataaccagtgcaggactgcctggtgcgggaatgcccagtgcaggaatacctagtgcaggaggtgaagagcatgccttcctgactgtaggatcaaaggaagccaataatgggcctccatttaactttcctggtaattttggtggatcaaatgcctttgggccaccaatccctcctccaggattaggaggcggggcctttggtgatgctaggcctggtatgccttcagttggaaacagtggtttgcctggtctaggactggatgttccgggttttggaggtggaccaaacaatttaagtgggccatcgggatttggagggggccctcagaattttggaaatggccctggtagcttaggcggtcccccggggtttggaagtggccctcctggtcttggaagtgcccctgggcatttgggtgggccaccagcttttgggcctggccccggccccggccccggccctggcccaatccatattggtggtccccctggctttgcatctagttctggaaaaccaggaccgacagtaattaaagtgcaaaacatgccctttactgtgtctattgatgagattttagatttcttttatggctatcaagtaatcccaggctcagtgtgtttaaaatacaatgaaaaaggtatgcccacaggtgaagccatggtggcctttgagtctcgggatgaagccacagctgctgtcattgacttaaatgacaggcctataggttcaagaaaagtaaaacttgtattagggtagccattcacatcattttttatagggtagatcttcatattgctgtgattaatgcatccagattgttttcctagtatttccaggttagaacctgtggattgtttcaattgcatatagcttggtttccataacatagagcattggttgactgtttacagaagactcactcaccaggataaacattgctgtatgttacagtaaagctatctggagagaacacataaatgattttggcataccattagagaaaccatttgtaaaactcaaatgaccacataaagcttatcaaggagtctagattggttttgttttataccatatgggatgaagaaaatagaaatgtcagtagaactcattgagggtgctcttgccagctgctgaaaatagaagttggctactctcagaatttggtttaaagctggacagatttgctttgttatagggtaaagctttgtctaaagtcctcattttcttttaaaattgaataaaatttctgtatacagattcattgtatgtacctttattgcttcttaagggtccttgctgtatagacagtcctgcttcagaagttgctgctttgtttgtctaattgactcatttgtaaatgagcagaactgttttgttggtttttttccctaaatataaaagtccacacttcgtttgtgctataacctcaaactttgatttctaatgtcacacttaaaactgtgtggaataagacttttgccataaaaataaactatggagtcctttatctaccagagcctttttggtttgaccgccacgatttaggttagtcagtttaaaaattgttcatgttgtttggatggtatcgaaaaccagaaaccacttttaataatgtgtttaagatacttgatttgaagtccttttcatatggactaattgtagtatcaatttcctcctgtcccgattatgtgaaattttggcctttaaacaaagaggggcccattcataagaaagtgttatatctaggtttttaaaactgaagttgaaattatctttgttagcagtagtagtatagaataaaagatccgtatgctggttcgtagattgatacgtgttagtcctgttatttggaggctttttggcatagttgttcgatcaggagcctgtttactaaaagtcttcatacagagtacaagtgcagccgccagaggagaaaattgagattcttgaccctttcatactcttttctttggtattcaggacactaaggcaggaggaccacatgagttctggttggtaagtgtccttgtcatgaaaacacttgccttacaaggctctaattatgatttccctagtcagtgctctgaagatgtgtcacattatattataaacaatacggaaggggagataggtgagatgatatgaaaaacaaattttctcactgtcataaaaggctctaattatggttactttccttgtgatgaaaaacttggccttacagggctctagttatggttactttccctagtcaatgctctgaaaatgtgtcacattataaacaatacagaaggagagatagatgagagatcatgaaaaccaaattttatcttttacatggcccctttgtcttcgtttgaaacatccccaacatttcctacaaatcagcgtagttacaaaggggtcagtcttttaaaataagtatttcctattaaactatatatatatacagtgcctttttggtgttgtgagtcagtggaacactgaaatacagcggttgtgtaatttaagagtggcaacagtttcatttgataagatttgaaaaggctttttatcactacaatcttagaggattgacagtacaggatttttgtttaagagaaggattgtttagactcaagaggtgactatgttgtgggtcttttgataattcatgaatacagatttgctttgaccgatcactagatactgcctcctcaatttcaaaagcaatataacgtttgtatatgctgtttaatttaagttaatgttaagtaatcatttctcattccaaagacaatgcaaaaaacttcagcactgcttgagagttgtatttcagccacagatattttctccattggaaagctattttcattttagaaaaatgggttgtttgaagatgaaagtcttttatcttttttcacaatttattttggttatatgttcgtacattcttattaaatatttcatacactttattgc

SEQ ID NO: 9750 - protein, 771 aa, Homo sapiens; identical to SEQ ID NO: 9686

SEQ ID NO: 9751 - DNA, 5168 bp, Homo sapiens
ggccattttgtgaagcggcgaaggaggtggtggctgcgttgggctccgggaagccgttcgggctggggctgtcggccgcggggcggaggcactcgcgcggggggtaattcggggtctgggttctggtgccgcgcagctttccccggtgtgtgtggtttcagcgcagcatggctgtggtcatccgtttgcaaggtctcccaattgtggcggggaccatggacattcgccacttcttctctggattgaccattcctgatgggggcgtgcatattgtagggggtgaactgggtgaggctttcatcgtttttgccactgatgaagatgcaaggcttggtatgatgcgcacaggtggtacaattaaagggtcaaaagtaacactattgttgagtagtaagacggaaatgcagaatatgattgaactgagtcgtaggcgttttgaaactgccaacttagatataccaccagcaaatgccagtagatcaggaccaccacctagctcaggaatgagtagcagggtaaacttgcccacaacagtatccaactttaataatccatcacccagtgtagttactgccaccacttctgttcatgaaagcaacaaaaacatacagacattttccacagccagcgtaggaacagctcctccaaatatgggggcttcctttgggagcccaacgtttagctcaactgttccaagcacagcctctccaatgaacacagtcccgccgccaccaattcctccaattccagcgatgccatctctgccaccaatgccatccattcccccaattccagttcctcctccagtacctacattgcctcctgtgcctcctgtgcccccgattcccccagttccttctgtgccacccatgaccccactgccacccatgtcgggcatgccgcccttgaatccgccacctgtggcacctctacctgctggaatgaatggctctggagcacctatgaatttgaacaataatctgaatcctatgtttcttggtccgttgaatcctgttaaccctatccagatgaactctcagagcagtgtgaagccactccccatcaaccctgatgatctgtatgtcagtgtgcatggaatgcccttttctgcaatggaaaatgatgtcagagatttttttcatgggctccgtgttgatgcagtgcatttgttgaaagatcatgtaggtcgaaataatgggaatggattggttaagtttctctcccctcaagatacatttgaagctttgaaacgaaacagaatgctgatgattcaacgctatgtggaagttagccctgccacagaaagacagtgggtagctgctggaggccatatcacttttaagcaaaatatgggaccttctggacaaactcatccccctcctcagacacttcccaggtcaaaatcgcccagtgggcagaaaagatcaaggtcaagatcaccacatgaggctggtttttgtgtttacttgaaagggctaccatttgaagcagaaaacaaacatgtcattgatttttttaaaaagctggatattgtggaagatagtatttatatagcttatggacccaatgggaaagcaactggcgaaggctttgtagagttcagaaatgaggctgactataaggctgctctgtgtcgtcataaacagtacatgggcaatcgctttattcaagttcatccaattactaagaaaggtatgctagaaaagatagatatgattcgaaaaagactgcagaacttcagctatgaccagagggaaatgatactaaatccagagggggatgtcaactctgccaaagtctgtgcccacataacaaatattccattcagcattacaaagatggatgttcttcagttcctagaaggaatcccagtggatgaaaatgctgtacatgttcttgttgataacaatgggcaaggtctaggacaggcattggttcagtttaaaaatgaagatgatgcacgtaagtctgaacgcttacaccgtaaaaaacttaatgggagagaagcttttgttcatgtagttaccctagaagatatgagagagattgagaaaaatccccctgcccaaggaaaaaagggattaaagatgcctgtgccaggtaatcctgcagttccaggaatgcccaatgcgggactgcccggtgtgggactgcccagtgcaggacttcccggtgcaggcctgcccagcacaggactgcctggttcagcaataaccagtgcaggactgcctggtgcgggaatgcccagtgcaggaatacctagtgcaggaggtgaagagcatgccttcctgactgtaggatcaaaggaagccaataatgggcctccatttaactttcctggtaattttggtggatcaaatgcctttgggccaccaatccctcctccaggattaggaggcggggcctttggtgatgctaggcctggtatgccttcagttggaaacagtggtttgcctggtctaggactggatgttccgggttttggaggtggaccaaacaatttaagtgggccatcgggatttggagggggccctcagaattttggaaatggccctggtagcttaggcggtcccccggggtttggaagtggccctcctggtcttggaagtgcccctgggcatttgggtgggccaccagcttttgggcctggccccggccccggccccggccctggcccaatccatattggtggtccccctggctttgcatctagttctggaaaaccaggaccgacagtaattaaagtgcaaaacatgccctttactgtgtctattgatgagattttagatttcttttatggctatcaagtaatcccaggctcagtgtgtttaaaatacaatgaaaaaggtatgcccacaggtgaagccatggtggcctttgagtctcgggatgaagccacagctgctgtcattgacttaaatgacaggcctataggttcaagaaaagtaaaacttgtattagggtagccattcacatcattttttatagggtagatcttcatattgctgtgattaatgcatccagattgttttcctagtatttccaggttagaacctgtggattgtttcaattgcatatagcttggtttccataacatagagcattggttgactgtttacagaagactcactcaccaggataaacattgctgtatgttacagtaaagctatctggagagaacacataaatgattttggcataccattagagaaaccatttgtaaaactcaaatgaccacataaagcttatcaaggagtctagattggttttgttttataccatatgggatgaagaaaatagaaatgtcagtagaactcattgagggtgctcttgccagctgctgaaaatagaagttggctactctcagaatttggtttaaagctggacagatttgctttgttatagggtaaagctttgtctaaagtcctcattttcttttaaaattgaataaaatttctgtatacagattcattgtatgtacctttattgcttcttaagggtccttgctgtatagacagtcctgcttcagaagttgctgctttgtttgtctaattgactcatttgtaaatgagcagaactgttttgttggtttttttccctaaatataaaagtccacacttcgtttgtgctataacctcaaactttgatttctaatgtcacacttaaaactgtgtggaataagacttttgccataaaaataaactatggagtcctttatctaccagagcctttttggtttgaccgccacgatttaggttagtcagtttaaaaattgttcatgttgtttggatggtatcgaaaaccagaaaccacttttaataatgtgtttaagatacttgatttgaagtccttttcatatggactaattgtagtatcaatttcctcctgtcccgattatgtgaaattttggcctttaaacaaagaggggcccattcataagaaagtgttatatctaggtttttaaaactgaagttgaaattatctttgttagcagtagtagtatagaataaaagatccgtatgctggttcgtagattgatacgtgttagtcctgttatttggaggctttttggcatagttgttcgatcaggagcctgtttactaaaagtcttcatacagagtacaagtgcagccgccagaggagaaaattgagattcttgaccctttcatactcttttctttggtattcaggacactaaggcaggaggaccacatgagttctggttggtaagtgtccttgtcatgaaaacacttgccttacaaggctctaattatgatttccctagtcagtgctctgaagatgtgtcacattatattataaacaatacggaaggggagataggtgagatgatatgaaaaacaaattttctcactgtcataaaaggctctaattatggttactttccttgtgatgaaaaacttggccttacagggctctagttatggttactttccctagtcaatgctctgaaaatgtgtcacattataaacaatacagaaggagagatagatgagagatcatgaaaaccaaattttatcttttacatggcccctttgtcttcgtttgaaacatccccaacatttcctacaaatcagcgtagttacaaaggggtcagtcttttaaaataagtatttcctattaaactatatatatatacagtgcctttttggtgttgtgagtcagtggaacactgaaatacagcggttgtgtaatttaagagtggcaacagtttcatttgataagatttgaaaaggctttttatcactacaatcttagaggattgacagtacaggatttttgtttaagagaaggattgtttagactcaagaggtgactatgttgtgggtcttttgataattcatgaatacagatttgctttgaccgatcactagatactgcctcctcaatttcaaaagcaatataacgtttgtatatgctgtttaatttaagttaatgttaagtaatcatttctcattccaaagacaatgcaaaaaacttcagcactgcttgagagttgtatttcagccacagatattttctccattggaaagctattttcattttagaaaaatgggttgtttgaagatgaaagtcttttatcttttttcacaatttattttggttatatgttcgtacattcttattaaatatttcatacactttattgc

SEQ ID NO: 9752 - protein, 932 aa, Homo sapiens; identical to SEQ ID NO: 1239

SEQ ID NO: 9753 - DNA, 4430 bp, Homo sapiens
ggccattttgtgaagcggcgaaggaggtggtggctgcgttgggctccgggaagccgttcgggctggggctgtcggccgcggggcggaggcactcgcgcggggggtaattcggggtctgggttctggtgccgcgcagctttccccgtctaaaagttggttttaattggttgcccacaggattgacttggcctctacctgctggaatgaatggctctggagcacctatgaatttgaacaataatctgaatcctatgtttcttggtccgttgaatcctgttaaccctatccagatgaactctcagagcagtgtgaagccactccccatcaaccctgatgatctgtatgtcagtgtgcatggaatgcccttttctgcaatggaaaatgatgtcagagatttttttcatgggctccgtgttgatgcagtgcatttgttgaaagatcatgtaggtcgaaataatgggaatggattggttaagtttctctcccctcaagatacatttgaagctttgaaacgaaacagaatgctgatgattcaacgctatgtggaagttagccctgccacagaaagacagtgggtagctgctggaggccatatcacttttaagcaaaatatgggaccttctggacaaactcatccccctcctcagacacttcccaggtcaaaatcgcccagtgggcagaaaagatcaaggtcaagatcaccacatgaggctggtttttgtgtttacttgaaagggctaccatttgaagcagaaaacaaacatgtcattgatttttttaaaaagctggatattgtggaagatagtatttatatagcttatggacccaatgggaaagcaactggcgaaggctttgtagagttcagaaatgaggctgactataaggctgctctgtgtcgtcataaacagtacatgggcaatcgctttattcaagttcatccaattactaagaaaggtatgctagaaaagatagatatgattcgaaaaagactgcagaacttcagctatgaccagagggaaatgatactaaatccagagggggatgtcaactctgccaaagtctgtgcccacataacaaatattccattcagcattacaaagatggatgttcttcagttcctagaaggaatcccagtggatgaaaatgctgtacatgttcttgttgataacaatgggcaaggtctaggacaggcattggttcagtttaaaaatgaagatgatgcacgtaagtctgaacgcttacaccgtaaaaaacttaatgggagagaagcttttgttcatgtagttaccctagaagatatgagagagattgagaaaaatccccctgcccaaggaaaaaagggattaaagatgcctgtgccaggtaatcctgcagttccaggaatgcccaatgcgggactgcccggtgtgggactgcccagtgcaggacttcccggtgcaggcctgcccagcacaggactgcctggttcagcaataaccagtgcaggactgcctggtgcgggaatgcccagtgcaggaatacctagtgcaggaggtgaagagcatgccttcctgactgtaggatcaaaggaagccaataatgggcctccatttaactttcctggtaattttggtggatcaaatgcctttgggccaccaatccctcctccaggattaggaggcggggcctttggtgatgctaggcctggtatgccttcagttggaaacagtggtttgcctggtctaggactggatgttccgggttttggaggtggaccaaacaatttaagtgggccatcgggatttggagggggccctcagaattttggaaatggccctggtagcttaggcggtcccccggggtttggaagtggccctcctggtcttggaagtgcccctgggcatttgggtgggccaccagcttttgggcctggccccggccccggccccggccctggcccaatccatattggtggtccccctggctttgcatctagttctggaaaaccaggaccgacagtaattaaagtgcaaaacatgccctttactgtgtctattgatgagattttagatttcttttatggctatcaagtaatcccaggctcagtgtgtttaaaatacaatgaaaaaggtatgcccacaggtgaagccatggtggcctttgagtctcgggatgaagccacagctgctgtcattgacttaaatgacaggcctataggttcaagaaaagtaaaacttgtattagggtagccattcacatcattttttatagggtagatcttcatattgctgtgattaatgcatccagattgttttcctagtatttccaggttagaacctgtggattgtttcaattgcatatagcttggtttccataacatagagcattggttgactgtttacagaagactcactcaccaggataaacattgctgtatgttacagtaaagctatctggagagaacacataaatgattttggcataccattagagaaaccatttgtaaaactcaaatgaccacataaagcttatcaaggagtctagattggttttgttttataccatatgggatgaagaaaatagaaatgtcagtagaactcattgagggtgctcttgccagctgctgaaaatagaagttggctactctcagaatttggtttaaagctggacagatttgctttgttatagggtaaagctttgtctaaagtcctcattttcttttaaaattgaataaaatttctgtatacagattcattgtatgtacctttattgcttcttaagggtccttgctgtatagacagtcctgcttcagaagttgctgctttgtttgtctaattgactcatttgtaaatgagcagaactgttttgttggtttttttccctaaatataaaagtccacacttcgtttgtgctataacctcaaactttgatttctaatgtcacacttaaaactgtgtggaataagacttttgccataaaaataaactatggagtcctttatctaccagagcctttttggtttgaccgccacgatttaggttagtcagtttaaaaattgttcatgttgtttggatggtatcgaaaaccagaaaccacttttaataatgtgtttaagatacttgatttgaagtccttttcatatggactaattgtagtatcaatttcctcctgtcccgattatgtgaaattttggcctttaaacaaagaggggcccattcataagaaagtgttatatctaggtttttaaaactgaagttgaaattatctttgttagcagtagtagtatagaataaaagatccgtatgctggttcgtagattgatacgtgttagtcctgttatttggaggctttttggcatagttgttcgatcaggagcctgtttactaaaagtcttcatacagagtacaagtgcagccgccagaggagaaaattgagattcttgaccctttcatactcttttctttggtattcaggacactaaggcaggaggaccacatgagttctggttggtaagtgtccttgtcatgaaaacacttgccttacaaggctctaattatgatttccctagtcagtgctctgaagatgtgtcacattatattataaacaatacggaaggggagataggtgagatgatatgaaaaacaaattttctcactgtcataaaaggctctaattatggttactttccttgtgatgaaaaacttggccttacagggctctagttatggttactttccctagtcaatgctctgaaaatgtgtcacattataaacaatacagaaggagagatagatgagagatcatgaaaaccaaattttatcttttacatggcccctttgtcttcgtttgaaacatccccaacatttcctacaaatcagcgtagttacaaaggggtcagtcttttaaaataagtatttcctattaaactatatatatatacagtgcctttttggtgttgtgagtcagtggaacactgaaatacagcggttgtgtaatttaagagtggcaacagtttcatttgataagatttgaaaaggctttttatcactacaatcttagaggattgacagtacaggatttttgtttaagagaaggattgtttagactcaagaggtgactatgttgtgggtcttttgataattcatgaatacagatttgctttgaccgatcactagatactgcctcctcaatttcaaaagcaatataacgtttgtatatgctgtttaatttaagttaatgttaagtaatcatttctcattccaaagacaatgcaaaaaacttcagcactgcttgagagttgtatttcagccacagatattttctccattggaaagctattttcattttagaaaaatgggttgtttgaagatgaaagtcttttatcttttttcacaatttattttggttatatgttcgtacattcttattaaatatttcatacactttattgc

SEQ ID NO: 9754 - protein, 674 aa, Homo sapiens; identical to SEQ ID NO: 9698

SEQ ID NO: 9755 - DNA, 4151 bp, Homo sapiens
ggaacgcggagccgctgagcgggccgacggccattttgtgaagcggcgaaggaggtggtggctgcgttgggctccgggaagccgttcgggctggggctgtcggccgcggggcggaggcactcgcgcgggggtctaaaagttggttttaattggttgcccacaggattgacttggcctctacttcttgttaaggaaattcatctcttgttttatcaggtgtgtgtggtttcagcgcagcatggctgtggtcatccgtttgcaaggtctcccaattgtggcggggaccatggacattcgccacttcttctctggattgaccattcctgatgggggcgtgcatattgtagggggtgaactgggtgaggctttcatcgtttttgccactgatgaagatgcaaggcttggtatgatgcgcacaggtggtacaattaaagggtcaaaagtaacactattgttgagtagtaagacggaaatgcagaatatgattgaactgattttttaaaaagctggatattgtggaagatagtatttatatagcttatggacccaatgggaaagcaactggcgaaggctttgtagagttcagaaatgaggctgactataaggctgctctgtgtcgtcataaacagtacatgggcaatcgctttattcaagttcatccaattactaagaaaggtatgctagaaaagatagatatgattcgaaaaagactgcagaacttcagctatgaccagagggaaatgatactaaatccagagggggatgtcaactctgccaaagtctgtgcccacataacaaatattccattcagcattacaaagatggatgttcttcagttcctagaaggaatcccagtggatgaaaatgctgtacatgttcttgttgataacaatgggcaaggtctaggacaggcattggttcagtttaaaaatgaagatgatgcacgtaagtctgaacgcttacaccgtaaaaaacttaatgggagagaagcttttgttcatgtagttaccctagaagatatgagagagattgagaaaaatccccctgcccaaggaaaaaagggattaaagatgcctgtgccaggtaatcctgcagttccaggaatgcccaatgcgggactgcccggtgtgggactgcccagtgcaggacttcccggtgcaggcctgcccagcacaggactgcctggttcagcaataaccagtgcaggactgcctggtgcgggaatgcccagtgcaggaatacctagtgcaggaggtgaagagcatgccttcctgactgtaggatcaaaggaagccaataatgggcctccatttaactttcctggtaattttggtggatcaaatgcctttgggccaccaatccctcctccaggattaggaggcggggcctttggtgatgctaggcctggtatgccttcagttggaaacagtggtttgcctggtctaggactggatgttccgggttttggaggtggaccaaacaatttaagtgggccatcgggatttggagggggccctcagaattttggaaatggccctggtagcttaggcggtcccccggggtttggaagtggccctcctggtcttggaagtgcccctgggcatttgggtgggccaccagcttttgggcctggccccggccccggccccggccctggcccaatccatattggtggtccccctggctttgcatctagttctggaaaaccaggaccgacagtaattaaagtgcaaaacatgccctttactgtgtctattgatgagattttagatttcttttatggctatcaagtaatcccaggctcagtgtgtttaaaatacaatgaaaaaggtatgcccacaggtgaagccatggtggcctttgagtctcgggatgaagccacagctgctgtcattgacttaaatgacaggcctataggttcaagaaaagtaaaacttgtattagggtagccattcacatcattttttatagggtagatcttcatattgctgtgattaatgcatccagattgttttcctagtatttccaggttagaacctgtggattgtttcaattgcatatagcttggtttccataacatagagcattggttgactgtttacagaagactcactcaccaggataaacattgctgtatgttacagtaaagctatctggagagaacacataaatgattttggcataccattagagaaaccatttgtaaaactcaaatgaccacataaagcttatcaaggagtctagattggttttgttttataccatatgggatgaagaaaatagaaatgtcagtagaactcattgagggtgctcttgccagctgctgaaaatagaagttggctactctcagaatttggtttaaagctggacagatttgctttgttatagggtaaagctttgtctaaagtcctcattttcttttaaaattgaataaaatttctgtatacagattcattgtatgtacctttattgcttcttaagggtccttgctgtatagacagtcctgcttcagaagttgctgctttgtttgtctaattgactcatttgtaaatgagcagaactgttttgttggtttttttccctaaatataaaagtccacacttcgtttgtgctataacctcaaactttgatttctaatgtcacacttaaaactgtgtggaataagacttttgccataaaaataaactatggagtcctttatctaccagagcctttttggtttgaccgccacgatttaggttagtcagtttaaaaattgttcatgttgtttggatggtatcgaaaaccagaaaccacttttaataatgtgtttaagatacttgatttgaagtccttttcatatggactaattgtagtatcaatttcctcctgtcccgattatgtgaaattttggcctttaaacaaagaggggcccattcataagaaagtgttatatctaggtttttaaaactgaagttgaaattatctttgttagcagtagtagtatagaataaaagatccgtatgctggttcgtagattgatacgtgttagtcctgttatttggaggctttttggcatagttgttcgatcaggagcctgtttactaaaagtcttcatacagagtacaagtgcagccgccagaggagaaaattgagattcttgaccctttcatactcttttctttggtattcaggacactaaggcaggaggaccacatgagttctggttggtaagtgtccttgtcatgaaaacacttgccttacaaggctctaattatgatttccctagtcagtgctctgaagatgtgtcacattatattataaacaatacggaaggggagataggtgagatgatatgaaaaacaaattttctcactgtcataaaaggctctaattatggttactttccttgtgatgaaaaacttggccttacagggctctagttatggttactttccctagtcaatgctctgaaaatgtgtcacattataaacaatacagaaggagagatagatgagagatcatgaaaaccaaattttatcttttacatggcccctttgtcttcgtttgaaacatccccaacatttcctacaaatcagcgtagttacaaaggggtcagtcttttaaaataagtatttcctattaaactatatatatatacagtgcctttttggtgttgtgagtcagtggaacactgaaatacagcggttgtgtaatttaagagtggcaacagtttcatttgataagatttgaaaaggctttttatcactacaatcttagaggattgacagtacaggatttttgtttaagagaaggattgtttagactcaagaggtgactatgttgtgggtcttttgataattcatgaatacagatttgctttgaccgatcactagatactgcctcctcaatttcaaaagcaatataacgtttgtatatgctgtttaatttaagttaatgttaagtaatcatttctcattccaaagacaatgcaaaaaacttcagcactgcttgagagttgtatttcagccacagatattttctccattggaaagctattttcattttagaaaaatgggttgtttgaagatgaaagtcttttatcttttttcacaatttattttggttatatgttcgtacattcttattaaatatttcatacactttattgc

SEQ ID NO: 9756 - protein, 87 aa, Homo sapiens; identical to SEQ ID NO: 9700

SEQ ID NO: 9757 - DNA, 5240 bp, Homo sapiens
tggaacgcggagccgctgagcgggccgacggccattttgtgaagcggcgaaggaggtggtggctgcgttgggctccgggaagccgttcgggctggggctgtcggccgcggggcggaggcactcgcgcgggggtctaaaagttggttttaattggttgcccacaggattgacttggcctctacttcttgttaaggaaattcatctcttgttttatcaggtgtgtgtggtttcagcgcagcatggctgtggtcatccgtttgcaaggtctcccaattgtggcggggaccatggacattcgccacttcttctctggattgaccattcctgatgggggcgtgcatattgtagggggtgaactgggtgaggctttcatcgtttttgccactgatgaagatgcaaggcttggtatgatgcgcacaggtggtacaattaaagggtcaaaagtaacactattgttgagtagtaagacggaaatgcagaatatgattgaactgagtcgtaggcgttttgaaactgccaacttagatataccaccagcaaatgccagtagatcaggaccaccacctagctcaggaatgagtagcagggtaaacttgcccacaacagtatccaactttaataatccatcacccagtgtagttactgccaccacttctgttcatgaaagcaacaaaaacatacagacattttccacagccagcgtaggaacagctcctccaaatatgggggcttcctttgggagcccaacgtttagctcaactgttccaagcacagcctctccaatgaacacagtcccgccgccaccaattcctccaattccagcgatgccatctctgccaccaatgccatccattcccccaattccagttcctcctccagtacctacattgcctcctgtgcctcctgtgcccccgattcccccagttccttctgtgccacccatgaccccactgccacccatgtcgggcatgccgcccttgaatccgccacctgtggcacctctacctgctggaatgaatggctctggagcacctatgaatttgaacaataatctgaatcctatgtttcttggtccgttgaatcctgttaaccctatccagatgaactctcagagcagtgtgaagccactccccatcaaccctgatgatctgtatgtcagtgtgcatggaatgcccttttctgcaatggaaaatgatgtcagagatttttttcatgggctccgtgttgatgcagtgcatttgttgaaagatcatgtaggtcgaaataatgggaatggattggttaagtttctctcccctcaagatacatttgaagctttgaaacgaaacagaatgctgatgattcaacgctatgtggaagttagccctgccacagaaagacagtgggtagctgctggaggccatatcacttttaagcaaaatatgggaccttctggacaaactcatccccctcctcagacacttcccaggtcaaaatcgcccagtgggcagaaaagatcaaggtcaagatcaccacatgaggctggtttttgtgtttacttgaaagggctaccatttgaagcagaaaacaaacatgtcattgatttttttaaaaagctggatattgtggaagatagtatttatatagcttatggacccaatgggaaagcaactggcgaaggctttgtagagttcagaaatgaggctgactataaggctgctctgtgtcgtcataaacagtacatgggcaatcgctttattcaagttcatccaattactaagaaaggtatgctagaaaagatagatatgattcgaaaaagactgcagaacttcagctatgaccagagggaaatgatactaaatccagagggggatgtcaactctgccaaagtctgtgcccacataacaaatattccattcagcattacaaagatggatgttcttcagttcctagaaggaatcccagtggatgaaaatgctgtacatgttcttgttgataacaatgggcaaggtctaggacaggcattggttcagtttaaaaatgaagatgatgcacgtaagtctgaacgcttacaccgtaaaaaacttaatgggagagaagcttttgttcatgtagttaccctagaagatatgagagagattgagaaaaatccccctgcccaaggaaaaaagggattaaagatgcctgtgccaggtaatcctgcagttccaggaatgcccaatgcgggactgcccggtgtgggactgcccagtgcaggacttcccggtgcaggcctgcccagcacaggactgcctggttcagcaataaccagtgcaggactgcctggtgcgggaatgcccagtgcaggaatacctagtgcaggaggtgaagagcatgccttcctgactgtaggatcaaaggaagccaataatgggcctccatttaactttcctggtaattttggtggatcaaatgcctttgggccaccaatccctcctccaggattaggaggcggggcctttggtgatgctaggcctggtatgccttcagttggaaacagtggtttgcctggtctaggactggatgttccgggttttggaggtggaccaaacaatttaagtgggccatcgggatttggagggggccctcagaattttggaaatggccctggtagcttaggcggtcccccggggtttggaagtggccctcctggtcttggaagtgcccctgggcatttgggtgggccaccagcttttgggcctggccccggccccggccccggccctggcccaatccatattggtggtccccctggctttgcatctagttctggaaaaccaggaccgacagtaattaaagtgcaaaacatgccctttactgtgtctattgatgagattttagatttcttttatggctatcaagtaatcccaggctcagtgtgtttaaaatacaatgaaaaaggtatgcccacaggtgaagccatggtggcctttgagtctcgggatgaagccacagctgctgtcattgacttaaatgacaggcctataggttcaagaaaagtaaaacttgtattagggtagccattcacatcattttttatagggtagatcttcatattgctgtgattaatgcatccagattgttttcctagtatttccaggttagaacctgtggattgtttcaattgcatatagcttggtttccataacatagagcattggttgactgtttacagaagactcactcaccaggataaacattgctgtatgttacagtaaagctatctggagagaacacataaatgattttggcataccattagagaaaccatttgtaaaactcaaatgaccacataaagcttatcaaggagtctagattggttttgttttataccatatgggatgaagaaaatagaaatgtcagtagaactcattgagggtgctcttgccagctgctgaaaatagaagttggctactctcagaatttggtttaaagctggacagatttgctttgttatagggtaaagctttgtctaaagtcctcattttcttttaaaattgaataaaatttctgtatacagattcattgtatgtacctttattgcttcttaagggtccttgctgtatagacagtcctgcttcagaagttgctgctttgtttgtctaattgactcatttgtaaatgagcagaactgttttgttggtttttttccctaaatataaaagtccacacttcgtttgtgctataacctcaaactttgatttctaatgtcacacttaaaactgtgtggaataagacttttgccataaaaataaactatggagtcctttatctaccagagcctttttggtttgaccgccacgatttaggttagtcagtttaaaaattgttcatgttgtttggatggtatcgaaaaccagaaaccacttttaataatgtgtttaagatacttgatttgaagtccttttcatatggactaattgtagtatcaatttcctcctgtcccgattatgtgaaattttggcctttaaacaaagaggggcccattcataagaaagtgttatatctaggtttttaaaactgaagttgaaattatctttgttagcagtagtagtatagaataaaagatccgtatgctggttcgtagattgatacgtgttagtcctgttatttggaggctttttggcatagttgttcgatcaggagcctgtttactaaaagtcttcatacagagtacaagtgcagccgccagaggagaaaattgagattcttgaccctttcatactcttttctttggtattcaggacactaaggcaggaggaccacatgagttctggttggtaagtgtccttgtcatgaaaacacttgccttacaaggctctaattatgatttccctagtcagtgctctgaagatgtgtcacattatattataaacaatacggaaggggagataggtgagatgatatgaaaaacaaattttctcactgtcataaaaggctctaattatggttactttccttgtgatgaaaaacttggccttacagggctctagttatggttactttccctagtcaatgctctgaaaatgtgtcacattataaacaatacagaaggagagatagatgagagatcatgaaaaccaaattttatcttttacatggcccctttgtcttcgtttgaaacatccccaacatttcctacaaatcagcgtagttacaaaggggtcagtcttttaaaataagtatttcctattaaactatatatatatacagtgcctttttggtgttgtgagtcagtggaacactgaaatacagcggttgtgtaatttaagagtggcaacagtttcatttgataagatttgaaaaggctttttatcactacaatcttagaggattgacagtacaggatttttgtttaagagaaggattgtttagactcaagaggtgactatgttgtgggtcttttgataattcatgaatacagatttgctttgaccgatcactagatactgcctcctcaatttcaaaagcaatataacgtttgtatatgctgtttaatttaagttaatgttaagtaatcatttctcattccaaagacaatgcaaaaaacttcagcactgcttgagagttgtatttcagccacagatattttctccattggaaagctattttcattttagaaaaatgggttgtttgaagatgaaagtcttttatcttttttcacaatttattttggttatatgttcgtacattcttattaaatatttcatacactttattgc

SEQ ID NO: 9758 - protein, 932 aa, Homo sapiens; identical to SEQ ID NO: 1239

SEQ ID NO: 9759 - DNA, 5286 bp, Homo sapiens
cttctggaacgcggagccgctgagcgggccgacggccattttgtgaagcggcgaaggaggtggtggctgcgttgggctccgggaagccgttcgggctggggctgtcggccgcggggcggaggcactcgcgcggggggtaattcggggtctgggttctggtgccgcgcagctttccccgtctaaaagttggttttaattggttgcccacaggattgacttggcctctacttcttgttaaggaaattcatctcttgttttatcaggtgtgtgtggtttcagcgcagcatggctgtggtcatccgtttgcaaggtctcccaattgtggcggggaccatggacattcgccacttcttctctggattgaccattcctgatgggggcgtgcatattgtagggggtgaactgggtgaggctttcatcgtttttgccactgatgaagatgcaaggcttggtatgatgcgcacaggtggtacaattaaagggtcaaaagtaacactattgttgagtagtaagacggaaatgcagaatatgattgaactgagtcgtaggcgttttgaaactgccaacttagatataccaccagcaaatgccagtagatcaggaccaccacctagctcaggaatgagtagcagggtaaacttgcccacaacagtatccaactttaataatccatcacccagtgtagttactgccaccacttctgttcatgaaagcaacaaaaacatacagacattttccacagccagcgtaggaacagctcctccaaatatgggggcttcctttgggagcccaacgtttagctcaactgttccaagcacagcctctccaatgaacacagtcccgccgccaccaattcctccaattccagcgatgccatctctgccaccaatgccatccattcccccaattccagttcctcctccagtacctacattgcctcctgtgcctcctgtgcccccgattcccccagttccttctgtgccacccatgaccccactgccacccatgtcgggcatgccgcccttgaatccgccacctgtggcacctctacctgctggaatgaatggctctggagcacctatgaatttgaacaataatctgaatcctatgtttcttggtccgttgaatcctgttaaccctatccagatgaactctcagagcagtgtgaagccactccccatcaaccctgatgatctgtatgtcagtgtgcatggaatgcccttttctgcaatggaaaatgatgtcagagatttttttcatgggctccgtgttgatgcagtgcatttgttgaaagatcatgtaggtcgaaataatgggaatggattggttaagtttctctcccctcaagatacatttgaagctttgaaacgaaacagaatgctgatgattcaacgctatgtggaagttagccctgccacagaaagacagtgggtagctgctggaggccatatcacttttaagcaaaatatgggaccttctggacaaactcatccccctcctcagacacttcccaggtcaaaatcgcccagtgggcagaaaagatcaaggtcaagatcaccacatgaggctggtttttgtgtttacttgaaagggctaccatttgaagcagaaaacaaacatgtcattgatttttttaaaaagctggatattgtggaagatagtatttatatagcttatggacccaatgggaaagcaactggcgaaggctttgtagagttcagaaatgaggctgactataaggctgctctgtgtcgtcataaacagtacatgggcaatcgctttattcaagttcatccaattactaagaaaggtatgctagaaaagatagatatgattcgaaaaagactgcagaacttcagctatgaccagagggaaatgatactaaatccagagggggatgtcaactctgccaaagtctgtgcccacataacaaatattccattcagcattacaaagatggatgttcttcagttcctagaaggaatcccagtggatgaaaatgctgtacatgttcttgttgataacaatgggcaaggtctaggacaggcattggttcagtttaaaaatgaagatgatgcacgtaagtctgaacgcttacaccgtaaaaaacttaatgggagagaagcttttgttcatgtagttaccctagaagatatgagagagattgagaaaaatccccctgcccaaggaaaaaagggattaaagatgcctgtgccaggtaatcctgcagttccaggaatgcccaatgcgggactgcccggtgtgggactgcccagtgcaggacttcccggtgcaggcctgcccagcacaggactgcctggttcagcaataaccagtgcaggactgcctggtgcgggaatgcccagtgcaggaatacctagtgcaggaggtgaagagcatgccttcctgactgtaggatcaaaggaagccaataatgggcctccatttaactttcctggtaattttggtggatcaaatgcctttgggccaccaatccctcctccaggattaggaggcggggcctttggtgatgctaggcctggtatgccttcagttggaaacagtggtttgcctggtctaggactggatgttccgggttttggaggtggaccaaacaatttaagtgggccatcgggatttggagggggccctcagaattttggaaatggccctggtagcttaggcggtcccccggggtttggaagtggccctcctggtcttggaagtgcccctgggcatttgggtgggccaccagcttttgggcctggccccggccccggccccggccctggcccaatccatattggtggtccccctggctttgcatctagttctggaaaaccaggaccgacagtaattaaagtgcaaaacatgccctttactgtgtctattgatgagattttagatttcttttatggctatcaagtaatcccaggctcagtgtgtttaaaatacaatgaaaaaggtatgcccacaggtgaagccatggtggcctttgagtctcgggatgaagccacagctgctgtcattgacttaaatgacaggcctataggttcaagaaaagtaaaacttgtattagggtagccattcacatcattttttatagggtagatcttcatattgctgtgattaatgcatccagattgttttcctagtatttccaggttagaacctgtggattgtttcaattgcatatagcttggtttccataacatagagcattggttgactgtttacagaagactcactcaccaggataaacattgctgtatgttacagtaaagctatctggagagaacacataaatgattttggcataccattagagaaaccatttgtaaaactcaaatgaccacataaagcttatcaaggagtctagattggttttgttttataccatatgggatgaagaaaatagaaatgtcagtagaactcattgagggtgctcttgccagctgctgaaaatagaagttggctactctcagaatttggtttaaagctggacagatttgctttgttatagggtaaagctttgtctaaagtcctcattttcttttaaaattgaataaaatttctgtatacagattcattgtatgtacctttattgcttcttaagggtccttgctgtatagacagtcctgcttcagaagttgctgctttgtttgtctaattgactcatttgtaaatgagcagaactgttttgttggtttttttccctaaatataaaagtccacacttcgtttgtgctataacctcaaactttgatttctaatgtcacacttaaaactgtgtggaataagacttttgccataaaaataaactatggagtcctttatctaccagagcctttttggtttgaccgccacgatttaggttagtcagtttaaaaattgttcatgttgtttggatggtatcgaaaaccagaaaccacttttaataatgtgtttaagatacttgatttgaagtccttttcatatggactaattgtagtatcaatttcctcctgtcccgattatgtgaaattttggcctttaaacaaagaggggcccattcataagaaagtgttatatctaggtttttaaaactgaagttgaaattatctttgttagcagtagtagtatagaataaaagatccgtatgctggttcgtagattgatacgtgttagtcctgttatttggaggctttttggcatagttgttcgatcaggagcctgtttactaaaagtcttcatacagagtacaagtgcagccgccagaggagaaaattgagattcttgaccctttcatactcttttctttggtattcaggacactaaggcaggaggaccacatgagttctggttggtaagtgtccttgtcatgaaaacacttgccttacaaggctctaattatgatttccctagtcagtgctctgaagatgtgtcacattatattataaacaatacggaaggggagataggtgagatgatatgaaaaacaaattttctcactgtcataaaaggctctaattatggttactttccttgtgatgaaaaacttggccttacagggctctagttatggttactttccctagtcaatgctctgaaaatgtgtcacattataaacaatacagaaggagagatagatgagagatcatgaaaaccaaattttatcttttacatggcccctttgtcttcgtttgaaacatccccaacatttcctacaaatcagcgtagttacaaaggggtcagtcttttaaaataagtatttcctattaaactatatatatatacagtgcctttttggtgttgtgagtcagtggaacactgaaatacagcggttgtgtaatttaagagtggcaacagtttcatttgataagatttgaaaaggctttttatcactacaatcttagaggattgacagtacaggatttttgtttaagagaaggattgtttagactcaagaggtgactatgttgtgggtcttttgataattcatgaatacagatttgctttgaccgatcactagatactgcctcctcaatttcaaaagcaatataacgtttgtatatgctgtttaatttaagttaatgttaagtaatcatttctcattccaaagacaatgcaaaaaacttcagcactgcttgagagttgtatttcagccacagatattttctccattggaaagctattttcattttagaaaaatgggttgtttgaagatgaaagtcttttatcttttttcacaatttattttggttatatgttcgtacattcttattaaatatttcatacactttattgc

SEQ ID NO: 9760 - protein, 932 aa, Homo sapiens; identical to SEQ ID NO: 1239

SEQ ID NO: 9761 - DNA, 5154 bp, Homo sapiens
aaccacgccgttcctcccccttctggaacgcggagccgctgagcgggccgacggccattttgtgaagcggcgaaggaggattgacttggcctctacttcttgttaaggaaattcatctcttgttttatcaggtgtgtgtggtttcagcgcagcatggctgtggtcatccgtttgcaaggtctcccaattgtggcggggaccatggacattcgccacttcttctctggattgaccattcctgatgggggcgtgcatattgtagggggtgaactgggtgaggctttcatcgtttttgccactgatgaagatgcaaggcttggtatgatgcgcacaggtggtacaattaaagggtcaaaagtaacactattgttgagtagtaagacggaaatgcagaatatgattgaactgagtcgtaggcgttttgaaactgccaacttagatataccaccagcaaatgccagtagatcaggaccaccacctagctcaggaatgagtagcagggtaaacttgcccacaacagtatccaactttaataatccatcacccagtgtagttactgccaccacttctgttcatgaaagcaacaaaaacatacagacattttccacagccagcgtaggaacagctcctccaaatatgggggcttcctttgggagcccaacgtttagctcaactgttccaagcacagcctctccaatgaacacagtcccgccgccaccaattcctccaattccagcgatgccatctctgccaccaatgccatccattcccccaattccagttcctcctccagtacctacattgcctcctgtgcctcctgtgcccccgattcccccagttccttctgtgccacccatgaccccactgccacccatgtcgggcatgccgcccttgaatccgccacctgtggcacctctacctgctggaatgaatggctctggagcacctatgaatttgaacaataatctgaatcctatgtttcttggtccgttgaatcctgttaaccctatccagatgaactctcagagcagtgtgaagccactccccatcaaccctgatgatctgtatgtcagtgtgcatggaatgcccttttctgcaatggaaaatgatgtcagagatttttttcatgggctccgtgttgatgcagtgcatttgttgaaagatcatgtaggtcgaaataatgggaatggattggttaagtttctctcccctcaagatacatttgaagctttgaaacgaaacagaatgctgatgattcaacgctatgtggaagttagccctgccacagaaagacagtgggtagctgctggaggccatatcacttttaagcaaaatatgggaccttctggacaaactcatccccctcctcagacacttcccaggtcaaaatcgcccagtgggcagaaaagatcaaggtcaagatcaccacatgaggctggtttttgtgtttacttgaaagggctaccatttgaagcagaaaacaaacatgtcattgatttttttaaaaagctggatattgtggaagatagtatttatatagcttatggacccaatgggaaagcaactggcgaaggctttgtagagttcagaaatgaggctgactataaggctgctctgtgtcgtcataaacagtacatgggcaatcgctttattcaagttcatccaattactaagaaaggtatgctagaaaagatagatatgattcgaaaaagactgcagaacttcagctatgaccagagggaaatgatactaaatccagagggggatgtcaactctgccaaagtctgtgcccacataacaaatattccattcagcattacaaagatggatgttcttcagttcctagaaggaatcccagtggatgaaaatgctgtacatgttcttgttgataacaatgggcaaggtctaggacaggcattggttcagtttaaaaatgaagatgatgcacgtaagtctgaacgcttacaccgtaaaaaacttaatgggagagaagcttttgttcatgtagttaccctagaagatatgagagagattgagaaaaatccccctgcccaaggaaaaaagggattaaagatgcctgtgccaggtaatcctgcagttccaggaatgcccaatgcgggactgcccggtgtgggactgcccagtgcaggacttcccggtgcaggcctgcccagcacaggactgcctggttcagcaataaccagtgcaggactgcctggtgcgggaatgcccagtgcaggaatacctagtgcaggaggtgaagagcatgccttcctgactgtaggatcaaaggaagccaataatgggcctccatttaactttcctggtaattttggtggatcaaatgcctttgggccaccaatccctcctccaggattaggaggcggggcctttggtgatgctaggcctggtatgccttcagttggaaacagtggtttgcctggtctaggactggatgttccgggttttggaggtggaccaaacaatttaagtgggccatcgggatttggagggggccctcagaattttggaaatggccctggtagcttaggcggtcccccggggtttggaagtggccctcctggtcttggaagtgcccctgggcatttgggtgggccaccagcttttgggcctggccccggccccggccccggccctggcccaatccatattggtggtccccctggctttgcatctagttctggaaaaccaggaccgacagtaattaaagtgcaaaacatgccctttactgtgtctattgatgagattttagatttcttttatggctatcaagtaatcccaggctcagtgtgtttaaaatacaatgaaaaaggtatgcccacaggtgaagccatggtggcctttgagtctcgggatgaagccacagctgctgtcattgacttaaatgacaggcctataggttcaagaaaagtaaaacttgtattagggtagccattcacatcattttttatagggtagatcttcatattgctgtgattaatgcatccagattgttttcctagtatttccaggttagaacctgtggattgtttcaattgcatatagcttggtttccataacatagagcattggttgactgtttacagaagactcactcaccaggataaacattgctgtatgttacagtaaagctatctggagagaacacataaatgattttggcataccattagagaaaccatttgtaaaactcaaatgaccacataaagcttatcaaggagtctagattggttttgttttataccatatgggatgaagaaaatagaaatgtcagtagaactcattgagggtgctcttgccagctgctgaaaatagaagttggctactctcagaatttggtttaaagctggacagatttgctttgttatagggtaaagctttgtctaaagtcctcattttcttttaaaattgaataaaatttctgtatacagattcattgtatgtacctttattgcttcttaagggtccttgctgtatagacagtcctgcttcagaagttgctgctttgtttgtctaattgactcatttgtaaatgagcagaactgttttgttggtttttttccctaaatataaaagtccacacttcgtttgtgctataacctcaaactttgatttctaatgtcacacttaaaactgtgtggaataagacttttgccataaaaataaactatggagtcctttatctaccagagcctttttggtttgaccgccacgatttaggttagtcagtttaaaaattgttcatgttgtttggatggtatcgaaaaccagaaaccacttttaataatgtgtttaagatacttgatttgaagtccttttcatatggactaattgtagtatcaatttcctcctgtcccgattatgtgaaattttggcctttaaacaaagaggggcccattcataagaaagtgttatatctaggtttttaaaactgaagttgaaattatctttgttagcagtagtagtatagaataaaagatccgtatgctggttcgtagattgatacgtgttagtcctgttatttggaggctttttggcatagttgttcgatcaggagcctgtttactaaaagtcttcatacagagtacaagtgcagccgccagaggagaaaattgagattcttgaccctttcatactcttttctttggtattcaggacactaaggcaggaggaccacatgagttctggttggtaagtgtccttgtcatgaaaacacttgccttacaaggctctaattatgatttccctagtcagtgctctgaagatgtgtcacattatattataaacaatacggaaggggagataggtgagatgatatgaaaaacaaattttctcactgtcataaaaggctctaattatggttactttccttgtgatgaaaaacttggccttacagggctctagttatggttactttccctagtcaatgctctgaaaatgtgtcacattataaacaatacagaaggagagatagatgagagatcatgaaaaccaaattttatcttttacatggcccctttgtcttcgtttgaaacatccccaacatttcctacaaatcagcgtagttacaaaggggtcagtcttttaaaataagtatttcctattaaactatatatatatacagtgcctttttggtgttgtgagtcagtggaacactgaaatacagcggttgtgtaatttaagagtggcaacagtttcatttgataagatttgaaaaggctttttatcactacaatcttagaggattgacagtacaggatttttgtttaagagaaggattgtttagactcaagaggtgactatgttgtgggtcttttgataattcatgaatacagatttgctttgaccgatcactagatactgcctcctcaatttcaaaagcaatataacgtttgtatatgctgtttaatttaagttaatgttaagtaatcatttctcattccaaagacaatgcaaaaaacttcagcactgcttgagagttgtatttcagccacagatattttctccattggaaagctattttcattttagaaaaatgggttgtttgaagatgaaagtcttttatcttttttcacaatttattttggttatatgttcgtacattcttattaaatatttcatacactttattgc

SEQ ID NO: 9762 - protein, 932 aa, Homo sapiens; identical to SEQ ID NO: 1239

SEQ ID NO: 9763 - DNA, 1326 bp, Homo sapiens
tcctgttaaccctatccagatgaactctcagagcagtgtgaagccactccccatcaaccctgatgatctgtatgtcagtgtgcatggaatgcccttttctgcaatggaaaatgatgtcagagatttttttcatgggctccgtgttgatgcagtgcatttgttgaaagatcatgtaggtcgaaataatgggaatggattggttaagtttctctcccctcaagatacatttgaagctttgaaacgaaacagaatgctgatgattcaacgctatgtggaagttagccctgccacagaaagacagtgggtagctgctggaggccatatcacttttaagcaaaatatgggaccttctggacaaactcatccccctcctcagacacttcccaggtcaaaatcgcccagtgggcagaaaagatcaaggtcaagatcaccacatgaggctggtttttgtgtttacttgaaagggctaccatttgaagcagaaaacaaacatgtcattgatttttttaaaaagctggatattgtggaagatagtatttatatagcttatggacccaatgggaaagcaactggcgaaggctttgtagagttcagaaatgaggctgactataaggctgctctgtgtcgtcataaacagtacatgggcaatcgctttattcaagttcatccaattactaagaaaggtatgctagaaaagatagatatgattcgaaaaagatgtttacagaagactcactcaccaggataaacattgctgtatgttacagtaaagctatctggagagaacacataaatgattttggcataccattagagaaaccatttgtaaaactcaaatgaccacataaagcttatcaaggagtctagattggttttgttttataccatatgggatgaagaaaatagaaatgtcagtagaactcattgagggtgctcttgccagctgctgaaaatagaagttggctactctcagaatttggtttaaagctggacagatttgctttgttatagggtaaagctttgtctaaagtcctcattttcttttaaaattgaataaaatttctgtatacagattcattgtatgtacctttattgcttcttaagggtccttgctgtatagacagtcctgcttcagaagttgctgctttgtttgtctaattgactcatttgtaaatgagcagaactgttttgttggtttttttccctaaatataaaagtccacacttcgtttgtgctataacctcaaactttgatttctaatgtcacacttaaaactgtgtggaataagacttttgccataaaaataaactatggagtcctttatct

SEQ ID NO: 9764 - protein, 242 aa, Homo sapiens; identical to SEQ ID NO: 9676

SEQ ID NO: 9765 - DNA, 2555 bp, Homo sapiens
gaatgaatggctctggagcacctatgaatttgaacaataatctgaatcctatgtttcttggtccgttgaatcctgttaaccctatccagatgaactctcagagcagtgtgaagccactccccatcaaccctgatgatctgtatgtcagtgtgcatggaatgcccttttctgcaatggaaaatgatgtcagagatttttttcatgggctccgtgttgatgcagtgcatttgttgaaagatcatgtaggtcgaaataatgggaatggattggttaagtttctctcccctcaagatacatttgaagctttgaaacgaaacagaatgctgatgattcaacgctatgtggaagttagccctgccacagaaagacagtgggtagctgctggaggccatatcacttttaagcaaaatatgggaccttctggacaaactcatccccctcctcagacacttcccaggtcaaaatcgcccagtgggcagaaaagatcaaggtcaagatcaccacatgaggctggtttttgtgtttacttgaaagggctaccatttgaagcagaaaacaaacatgtcattgatttttttaaaaagctggatattgtggaagatagtatttatatagcttatggacccaatgggaaagcaactggcgaaggctttgtagagttcagaaatgaggctgactataaggctgctctgtgtcgtcataaacagtacatgggcaatcgctttattcaagttcatccaattactaagaaaggtatgctagaaaagatagatatgattcgaaaaagactgcagaacttcagctatgaccagagggaaatgatactaaatccagagggggatgtcaactctgccaaattaccctagaagatatgagagagattgagaaaaatccccctgcccaaggaaaaaagggattaaagatgcctgtgccaggtaatcctgcagttccaggaatgcccaatgcgggactgcccggtgtgggactgcccagtgcaggacttcccggtgcaggcctgcccagcacaggactgcctggttcagcaataaccagtgcaggactgcctggtgcgggaatgcccagtgcaggaatacctagtgcaggaggtgaagagcatgccttcctgactgtaggatcaaaggaagccaataatgggcctccatttaactttcctggtaattttggtggatcaaatgcctttgggccaccaatccctcctccaggattaggaggcggggcctttggtgatgctaggcctggtatgccttcagttggaaacagtggtttgcctggtctaggactggatgttccgggttttggaggtggaccaaacaatttaagtgggccatcgggatttggagggggccctcagaattttggaaatggccctggtagcttaggcggtcccccggggtttggaagtggccctcctggtcttggaagtgcccctgggcatttgggtgggccaccagcttttgggcctggccccggccccggccccggccctggcccaatccatattggtggtccccctggctttgcatctagttctggaaaaccaggaccgacagtaattaaagtgcaaaacatgccctttactgtgtctattgatgagattttagatttcttttatggctatcaagtaatcccaggctcagtgtgtttaaaatacaatgaaaaaggtatgcccacaggtgaagccatggtggcctttgagtctcgggatgaagccacagctgctgtcattgacttaaatgacaggcctataggttcaagaaaagtaaaacttgtattagggtagccattcacatcattttttatagggtagatcttcatattgctgtgattaatgcatccagattgttttcctagtatttccaggttagaacctgtggattgtttcaattgcatatagcttggtttccataacatagagcattggttgactgtttacagaagactcactcaccaggataaacattgctgtatgttacagtaaagctatctggagagaacacataaatgattttggcataccattagagaaaccatttgtaaaactcaaatgaccacataaagcttatcaaggagtctagattggttttgttttataccatatgggatgaagaaaatagaaatgtcagtagaactcattgagggtgctcttgccagctgctgaaaatagaagttggctactctcagaatttggtttaaagctggacagatttgctttgttatagggtaaagctttgtctaaagtcctcattttcttttaaaattgaataaaatttctgtatacagattcattgtatgtacctttattgcttcttaagggtccttgctgtatagacagtcctgcttcagaagttgctgctttgtttgtctaattgactcatttgtaaatgagcagaactgttttgttggtttttttccctaaatataaaagtccacacttcgtttgtgctataacctcaaactttgatttctaatgtcacacttaaaactgtgtggaataagacttttgccataaaaataaactatggagtcctttatct

SEQ ID NO: 9766 - protein, 287 aa, Homo sapiens; identical to SEQ ID NO: 9678

SEQ ID NO: 9767 - DNA, 2726 bp, Homo sapiens
ttgcctcctgtgcctcctgtgcccccgattcccccagttccttctgtgccacccatgaccccactgccacccatgtcgggcatgccgcccttgaatccgccacctgtggcacctctacctgctggaatgaatggctctggagcacctatgaatttgaacaataatctgaatcctatgtttcttggtccgttgaatcctgttaaccctatccagatgaactctcagagcagtgtgaagccactccccatcaaccctgatgatctgtatgtcagtgtgcatggaatgcccttttctgcaatggaaaatgatgtcagagatttttttcatgggctccgtgttgatgcagtgcatttgttgaaagatcatgtaggtcgaaataatgggaatggattggttaagtttctctcccctcaagatacatttgaagctttgaaacgaaacagaatgctgatgattcaacgctatgtggaagttagccctgccacagaaagacagtgggtagctgctggaggccatatcacttttaagcaaaatatgggaccttctggacaaactcatccccctcctcagacacttcccaggtcaaaatcgcccagtgggcagaaaagatcaaggtcaagatcaccacatgaggctggtttttgtgtttacttgaaagggctaccatttgaagcagaaaacaaacatgtcattgatttttttaaaaagctggatattgtggaagatagtatttatatagcttatggacccaatgggaaagcaactggcgaaggctttgtagagttcagaaatgaggctgactataaggctgctctgtgtcgtcataaacagtacatgggcaatcgctttattcaagttcatccaattactaagaaaggtatgctagaaaagatagatatgattcgaaaaagactgcagaacttcagctatgaccagagggaaatgatactaaatccagagggggatgtcaactctgccaaagtctgtgcccacataacaaatattccattcagcattacaaagatggatgttcttcagttcctagaaggaatcccagtggatgaaaatgctgtacatgttcttgttgataacaatgggcaaggtctaggacaggcattggttcagaatgcccaatgcgggactgcccggtgtgggactgcccagtgcaggacttcccggtgcaggcctgcccagcacaggactgcctggttcagcaataaccagtgcaggactgcctggtgcgggaatgcccagtgcaggaatacctagtgcaggaggtgaagagcatgccttcctgactgtaggatcaaaggaagccaataatgggcctccatttaactttcctggtaattttggtggatcaaatgcctttgggccaccaatccctcctccaggattaggaggcggggcctttggtgatgctaggcctggtatgccttcagttggaaacagtggtttgcctggtctaggactggatgttccgggttttggaggtggaccaaacaatttaagtgggccatcgggatttggagggggccctcagaattttggaaatggccctggtagcttaggcggtcccccggggtttggaagtggccctcctggtcttggaagtgcccctgggcatttgggtgggccaccagcttttgggcctggccccggccccggccccggccctggcccaatccatattggtggtccccctggctttgcatctagttctggaaaaccaggaccgacagtaattaaagtgcaaaacatgccctttactgtgtctattgatgagattttagatttcttttatggctatcaagtaatcccaggctcagtgtgtttaaaatacaatgaaaaaggtatgcccacaggtgaagccatggtggcctttgagtctcgggatgaagccacagctgctgtcattgacttaaatgacaggcctataggttcaagaaaagtaaaacttgtattagggtagccattcacatcattttttatagggtagatcttcatattgctgtgattaatgcatccagattgttttcctagtatttccaggttagaacctgtggattgtttcaattgcatatagcttggtttccataacatagagcattggttgactgtttacagaagactcactcaccaggataaacattgctgtatgttacagtaaagctatctggagagaacacataaatgattttggcataccattagagaaaccatttgtaaaactcaaatgaccacataaagcttatcaaggagtctagattggttttgttttataccatatgggatgaagaaaatagaaatgtcagtagaactcattgagggtgctcttgccagctgctgaaaatagaagttggctactctcagaatttggtttaaagctggacagatttgctttgttatagggtaaagctttgtctaaagtcctcattttcttttaaaattgaataaaatttctgtatacagattcattgtatgtacctttattgcttcttaagggtccttgctgtatagacagtcctgcttcagaagttgctgctttgtttgtctaattgactcatttgtaaatgagcagaactgttttgttggtttttttccctaaatataaaagtccacacttcgtttgtgctataacctcaaactttgatttctaatgtcacacttaaaactgtgtggaataagacttttgccataaaaataaactatggagtcctttatct

SEQ ID NO: 9768 - protein, 404 aa, Homo sapiens; identical to SEQ ID NO: 9680

SEQ ID NO: 9769 - DNA, 3482 bp, Homo sapiens
caggtgtgtgtggtttcagcgcagcatggctgtggtcatccgtttgcaaggtctcccaattgtggcggggaccatggacattcgccacttcttctctggattgaccattcctgatgggggcgtgcatattgtagggggtgaactgggtgaggctttcatcgtttttgccactgatgaagatgcaaggcttggtatgatgcgcacaggtggtacaattaaagggtcaaaagtaacactattgttgagtagtaagacggaaatgcagaatatgattgaactgagtcgtaggcgttttgaaactgccaacttagatataccaccagcaaatgccagtagatcaggaccaccacctagctcaggaatgagtagcagggtaaacttgcccacaacagtatccaactttaataatccatcacccagtgtagttactgccaccacttctgttcatgaaagcaacaaaaacatacagacattttccacagccagcgtaggaacagctcctccaaatatgggggcttcctttgggagcccaacgtttagctcaactgttccaagcacagcctctccaatgaacacagtcccgccgccaccaattcctccaattccagcgatgccatcttctgtgccacccatgaccccactgccacccatgtcgggcatgccgcccttgaatccgccacctgtggcacctctacctgctggaatgaatggctctggagcacctatgaatttgaacaataatctgaatcctatgtttcttggtccgttgaatcctgttaaccctatccagatgaactctcagagcagtgtgaagccactccccatcaaccctgatgatctgtatgtcagtgtgcatggaatgcccttttctgcaatggaaaatgatgtcagagatttttttcatgggctccgtgttgatgcagtgcatttgttgaaagatcatgtaggtcgaaataatgggaatggattggttaagtttctctcccctcaagatacatttgaagctttgaaacgaaacagaatgctgatgattcaacgctatgtggaagttagccctgccacagaaagacagtgggtagctgctggaggccatatcacttttaagcaaaatatgggaccttctggacaaactcatccccctcctcagacacttcccaggtcaaaatcgcccagtgggcagaaaagatcaaggtcaagatcaccacatgaggctggtttttgtgtttacttgaaagggctaccatttgaagcagaaaacaaacatgtcattgatttttttaaaaagctggatattgtggaagatagtatttatatagcttatggacccaatgggaaagcaactggcgaaggctttgtagagttcagaaatgaggctgactataaggctgctctgtgtcgtcataaacagtacatgggcaatcgctttattcaagttcatccaattactaagaaaggtatgctagaaaagatagatatgattcgaaaaagactgcagaacttcagctatgaccagagggaaatgatactaaatccagagggggatgtcaactctgccaaagtctgtgcccacataacaaatattccattcagcattacaaagatggatgttcttcagttcctagaaggaatcccagtggatgaaaatgctgtacatgttcttgttgataacaatgggcaaggtctaggacaggcattggttcagtttaaaaatgaagatgatgcacgtaagtctgaacgcttacaccgtaaaaaacttaatgggagagaagcttttgttcatgtagttaccctagaagatatgagagagattgagaaaaatccccctgcccaaggaaaaaagggattaaagatgcctgtgccaggtaatcctgcagttccaggaatgcccaatgcgggactgcccggtgtgggactgcccagtgcaggacttcccggtgcaggcctgcccagcacaggactgcctggttcagcaataaccagtgcaggactgcctggtgcgggaatgcccagtgcaggaatacctagtgcaggaggtgaagagcatgccttcctgactgtaggatcaaaggaagccaataatgggcctccatttaactttcctggtaattttggtggatcaaatgcctttgggccaccaatccctcctccaggattaggaggcggggcctttggtgatgctaggcctggtatgccttcagttggaaacagtggtttgcctggtctaggactggatgttccgggttttggaggtggaccaaacaatttaagtgggccatcgggatttggagggggccctcagaattttggaaatggccctggtagcttaggcggtcccccggggtttggaagtggccctcctggtcttggaagtgcccctgggcatttgggtgggccaccagcttttgggcctggccccggccccggccccggccctggcccaatccatattggtggtccccctggctttgcatctagttctggaaaaccaggaccgacagtaattaaagtgcaaaacatgccctttactgtgtctattgatgagattttagatttcttttatggctatcaagtaatcccaggctcagtgtgtttaaaatacaatgaaaaaggtatgcccacaggtgaagccatggtggcctttgagtctcgggatgaagccacagctgctgtcattgacttaaatgacaggcctataggttcaagaaaagtaaaacttgtattagggtagccattcacatcattttttatagggtagatcttcatattgctgtgattaatgcatccagattgttttcctagtatttccaggttagaacctgtggattgtttcaattgcatatagcttggtttccataacatagagcattggttgactgtttacagaagactcactcaccaggataaacattgctgtatgttacagtaaagctatctggagagaacacataaatgattttggcataccattagagaaaccatttgtaaaactcaaatgaccacataaagcttatcaaggagtctagattggttttgttttataccatatgggatgaagaaaatagaaatgtcagtagaactcattgagggtgctcttgccagctgctgaaaatagaagttggctactctcagaatttggtttaaagctggacagatttgctttgttatagggtaaagctttgtctaaagtcctcattttcttttaaaattgaataaaatttctgtatacagattcattgtatgtacctttattgcttcttaagggtccttgctgtatagacagtcctgcttcagaagttgctgctttgtttgtctaattgactcatttgtaaatgagcagaactgttttgttggtttttttccctaaatataaaagtccacacttcgtttgtgctataacctcaaactttgatttctaatgtcacacttaaaactgtgtggaataagacttttgccataaaaataaactatggagtcctttatct

SEQ ID NO: 9770 - protein, 900 aa, Homo sapiens; identical to SEQ ID NO: 9682

SEQ ID NO: 9771 - DNA, 3744 bp, Homo sapiens
gaaatgcctccgaggtccattgctggggaggggctttactcgagggtgtagcagttttgagaagccggcgtctgaagctaggagtctaaaagttggttttaattggttgcccacaggattgacttggcctctacttcttgttaaggaaattcatctcttgttttatcaggtgtgtgtggtttcagcgcagcatggctgtggtcatccgtttgcaaggtctcccaattgtggcggggaccatggacattcgccacttcttctctggattgaccattcctgatgggggcgtgcatattgtagggggtgaactgggtgaggctttcatcgtttttgccactgatgaagatgcaaggcttggtatgatgcgcacaggtggtacaattaaagggtcaaaagtaacactattgttgagtagtaagacggaaatgcagaatatgattgaactgagtcgtaggcgttttgaaactgccaacttagatataccaccagcaaatgccagtagatcaggaccaccacctagctcaggaatgagtagcagggtaaacttgcccacaacagtatccaactttaataatccatcacccagtgtagttactgccaccacttctgttcatgaaagcaacaaaaacatacagacattttccacagccagcgtaggaacagctcctccaaatatgggggcttcctttgggagcccaacgtttagctcaactgttccaagcacagcctctccaatgaacacagtcccgccgccaccaattcctccaattccagcgatgccatctctgccaccaatgccatccattcccccaattccagttcctcctccagtacctacattgcctcctgtgcctcctgtgcccccgattcccccagttccttctgtgccacccatgaccccactgccacccatgtcgggcatgccgcccttgaatccgccacctgtggcacctctacctgctggaatgaatggctctggagcacctatgaatttgaacaataatctgaatcctatgtttcttggtccgttgaatcctgttaaccctatccagatgaactctcagagcagtgtgaagccactccccatcaaccctgatgatctgtatgtcagtgtgcatggaatgcccttttctgcaatggaaaatgatgtcagagatttttttcatgggctccgtgttgatgcagtgcatttgttgaaagatcatgtaggtcgaaataatgggaatggattggttaagtttctctcccctcaagatacatttgaagctttgaaacgaaacagaatgctgatgattcaacgctatgtggaagttagccctgccacagaaagacagtgggtagctgctggaggccatatcacttttaagcaaaatatgggaccttctggacaaactcatccccctcctcagacacttcccaggtcaaaatcgcccagtgggcagaaaagatcaaggtcaagatcaccacatgaggctggtttttgtgtttacttgaaagggctaccatttgaagcagaaaacaaacatgtcattgatttttttaaaaagctggatattgtggaagatagtatttatatagcttatggacccaatgggaaagcaactggcgaaggctttgtagagttcagaaatgaggctgactataaggctgctctgtgtcgtcataaacagtacatgggcaatcgctttattcaagttcatccaattactaagaaaggtatgctagaaaagatagatatgattcgaaaaagactgcagaacttcagctatgaccagagggaaatgatactaaatccagagggggatgtcaactctgccaaagtctgtgcccacataacaaatattccattcagcattacaaagatggatgttcttcagttcctagaaggaatcccagtggatgaaaatgctgtacatgttcttgttgataacaatgggcaaggtctaggacaggcattggttcagtttaaaaatgaagatgatgcacgtaagtctgaacgcttacaccgtaaaaaacttaatgggagagaagcttttgttcatgtagttaccctagaagatatgagagagattgagaaaaatccccctgcccaaggaaaaaagggattaaagatgcctgtgccaggtaatcctgcagttccaggaatgcccaatgcgggactgcccggtgtgggactgcccagtgcaggacttcccggtgcaggcctgcccagcacaggactgcctggttcagcaataaccagtgcaggactgcctggtgcgggaatgcccagtgcaggaatacctagtgcaggaggtgaagagcatgccttcctgactgtaggatcaaaggaagccaataatgggcctccatttaactttcctggtaattttggtggatcaaatgcctttgggccaccaatccctcctccaggattaggaggcggggcctttggtgatgctaggcctggtatgccttcagttggaaacagtggtttgcctggtctaggactggatgttccgggttttggaggtggaccaaacaatttaagtgggccatcgggatttggagggggccctcagaattttggaaatggccctggtagcttaggcggtcccccggggtttggaagtggccctcctggtcttggaagtgcccctgggcatttgggtgggccaccagcttttgggcctggccccggccccggccccggccctggcccaatccatattggtggtccccctggctttgcatctagttctggaaaaccaggaccgacagtaattaaagtgcaaaacatgccctttactgtgtctattgatgagattttagatttcttttatggctatcaagtaatcccaggctcagtgtgtttaaaatacaatgaaaaaggtatgcccacaggtgaagccatggtggcctttgagtctcgggatgaagccacagctgctgtcattgacttaaatgacaggcctataggttcaagaaaagtaaaacttgtattagggtagccattcacatcattttttatagggtagatcttcatattgctgtgattaatgcatccagattgttttcctagtatttccaggttagaacctgtggattgtttcaattgcatatagcttggtttccataacatagagcattggttgactgtttacagaagactcactcaccaggataaacattgctgtatgttacagtaaagctatctggagagaacacataaatgattttggcataccattagagaaaccatttgtaaaactcaaatgaccacataaagcttatcaaggagtctagattggttttgttttataccatatgggatgaagaaaatagaaatgtcagtagaactcattgagggtgctcttgccagctgctgaaaatagaagttggctactctcagaatttggtttaaagctggacagatttgctttgttatagggtaaagctttgtctaaagtcctcattttcttttaaaattgaataaaatttctgtatacagattcattgtatgtacctttattgcttcttaagggtccttgctgtatagacagtcctgcttcagaagttgctgctttgtttgtctaattgactcatttgtaaatgagcagaactgttttgttggtttttttccctaaatataaaagtccacacttcgtttgtgctataacctcaaactttgatttctaatgtcacacttaaaactgtgtggaataagacttttgccataaaaataaactatggagtcctttatct

SEQ ID NO: 9772 - protein, 932 aa, Homo sapiens; identical to SEQ ID NO: 1239

SEQ ID NO: 9773 - DNA, 3337 bp, Homo sapiens
gtgaagcggcgaaggaggtggtggctgcgttgggctccgggaagccgttcgggctggggctgtcggccgcggggcggaggcactcgcgcggggggtaattcggggtctgggttctggtgccgcgcagctttccccgtctaaaagttggttttaattggttgcccacaggattgacttggcctctacttcttgttaaggaaattcatctcttgttttatcaggtgtgtgtggtttcagcgcaccagcgtaggaacagctcctccaaatatgggggcttcctttgggagcccaacgtttagctcaactgttccaagcacagcctctccaatgaacacagtcccgccgccaccaattcctccaattccagcgatgccatctctgccaccaatgccatccattcccccaattccagttcctcctccagtacctacattgcctcctgtgcctcctgtgcccccgattcccccagttccttctgtgccacccatgaccccactgccacccatgtcgggcatgccgcccttgaatccgccacctgtggcacctctacctgctggaatgaatggctctggagcacctatgaatttgaacaataatctgaatcctatgtttcttggtccgttgaatcctgttaaccctatccagatgaactctcagagcagtgtgaagccactccccatcaaccctgatgatctgtatgtcagtgtgcatggaatgcccttttctgcaatggaaaatgatgtcagagatttttttcatgggctccgtgttgatgcagtgcatttgttgaaagatcatgtaggtcgaaataatgggaatggattggttaagtttctctcccctcaagatacatttgaagctttgaaacgaaacagaatgctgatgattcaacgctatgtggaagttagccctgccacagaaagacagtgggtagctgctggaggccatatcacttttaagcaaaatatgggaccttctggacaaactcatccccctcctcagacacttcccaggtcaaaatcgcccagtgggcagaaaagatcaaggtcaagatcaccacatgaggctggtttttgtgtttacttgaaagggctaccatttgaagcagaaaacaaacatgtcattgatttttttaaaaagctggatattgtggaagatagtatttatatagcttatggacccaatgggaaagcaactggcgaaggctttgtagagttcagaaatgaggctgactataaggctgctctgtgtcgtcataaacagtacatgggcaatcgctttattcaagttcatccaattactaagaaaggtatgctagaaaagatagatatgattcgaaaaagactgcagaacttcagctatgaccagagggaaatgatactaaatccagagggggatgtcaactctgccaaagtctgtgcccacataacaaatattccattcagcattacaaagatggatgttcttcagttcctagaaggaatcccagtggatgaaaatgctgtacatgttcttgttgataacaatgggcaaggtctaggacaggcattggttcagtttaaaaatgaagatgatgcacgtaagtctgaacgcttacaccgtaaaaaacttaatgggagagaagcttttgttcatgtagttaccctagaagatatgagagagattgagaaaaatccccctgcccaaggaaaaaagggattaaagatgcctgtgccaggtaatcctgcagttccaggaatgcccaatgcgggactgcccggtgtgggactgcccagtgcaggacttcccggtgcaggcctgcccagcacaggactgcctggttcagcaataaccagtgcaggactgcctggtgcgggaatgcccagtgcaggaatacctagtgcaggaggtgaagagcatgccttcctgactgtaggatcaaaggaagccaataatgggcctccatttaactttcctggtaattttggtggatcaaatgcctttgggccaccaatccctcctccaggattaggaggcggggcctttggtgatgctaggcctggtatgccttcagttggaaacagtggtttgcctggtctaggactggatgttccgggttttggaggtggaccaaacaatttaagtgggccatcgggatttggagggggccctcagaattttggaaatggccctggtagcttaggcggtcccccggggtttggaagtggccctcctggtcttggaagtgcccctgggcatttgggtgggccaccagcttttgggcctggccccggccccggccccggccctggcccaatccatattggtggtccccctggctttgcatctagttctggaaaaccaggaccgacagtaattaaagtgcaaaacatgccctttactgtgtctattgatgagattttagatttcttttatggctatcaagtaatcccaggctcagtgtgtttaaaatacaatgaaaaaggtatgcccacaggtgaagccatggtggcctttgagtctcgggatgaagccacagctgctgtcattgacttaaatgacaggcctataggttcaagaaaagtaaaacttgtattagggtagccattcacatcattttttatagggtagatcttcatattgctgtgattaatgcatccagattgttttcctagtatttccaggttagaacctgtggattgtttcaattgcatatagcttggtttccataacatagagcattggttgactgtttacagaagactcactcaccaggataaacattgctgtatgttacagtaaagctatctggagagaacacataaatgattttggcataccattagagaaaccatttgtaaaactcaaatgaccacataaagcttatcaaggagtctagattggttttgttttataccatatgggatgaagaaaatagaaatgtcagtagaactcattgagggtgctcttgccagctgctgaaaatagaagttggctactctcagaatttggtttaaagctggacagatttgctttgttatagggtaaagctttgtctaaagtcctcattttcttttaaaattgaataaaatttctgtatacagattcattgtatgtacctttattgcttcttaagggtccttgctgtatagacagtcctgcttcagaagttgctgctttgtttgtctaattgactcatttgtaaatgagcagaactgttttgttggtttttttccctaaatataaaagtccacacttcgtttgtgctataacctcaaactttgatttctaatgtcacacttaaaactgtgtggaataagacttttgccataaaaataaactatggagtcctttatct

SEQ ID NO: 9774 - protein, 771 aa, Homo sapiens; identical to SEQ ID NO: 9686

SEQ ID NO: 9775 - DNA, 3653 bp, Homo sapiens
gtgaagcggcgaaggaggtggtggctgcgttgggctccgggaagccgttcgggctggggctgtcggccgcggggcggaggcactcgcgcggggggtaattcggggtctgggttctggtgccgcgcagctttccccgtctaaaagttggttttaattggttgcccacaggattgacttggccattcctgatgggggcgtgcatattgtagggggtgaactgggtgaggctttcatcgtttttgccactgatgaagatgcaaggcttggtatgatgcgcacaggtggtacaattaaagggtcaaaagtaacactattgttgagtagtaagacggaaatgcagaatatgattgaactgagtcgtaggcgttttgaaactgccaacttagatataccaccagcaaatgccagtagatcaggaccaccacctagctcaggaatgagtagcagggtaaacttgcccacaacagtatccaactttaataatccatcacccagtgtagttactgccaccacttctgttcatgaaagcaacaaaaacatacagacattttccacagccagcgtaggaacagctcctccaaatatgggggcttcctttgggagcccaacgtttagctcaactgttccaagcacagcctctccaatgaacacagtcccgccgccaccaattcctccaattccagcgatgccatctctgccaccaatgccatccattcccccaattccagttcctcctccagtacctacattgcctcctgtgcctcctgtgcccccgattcccccagttccttctgtgccacccatgaccccactgccacccatgtcgggcatgccgcccttgaatccgccacctgtggcacctctacctgctggaatgaatggctctggagcacctatgaatttgaacaataatctgaatcctatgtttcttggtccgttgaatcctgttaaccctatccagatgaactctcagagcagtgtgaagccactccccatcaaccctgatgatctgtatgtcagtgtgcatggaatgcccttttctgcaatggaaaatgatgtcagagatttttttcatgggctccgtgttgatgcagtgcatttgttgaaagatcatgtaggtcgaaataatgggaatggattggttaagtttctctcccctcaagatacatttgaagctttgaaacgaaacagaatgctgatgattcaacgctatgtggaagttagccctgccacagaaagacagtgggtagctgctggaggccatatcacttttaagcaaaatatgggaccttctggacaaactcatccccctcctcagacacttcccaggtcaaaatcgcccagtgggcagaaaagatcaaggtcaagatcaccacatgaggctggtttttgtgtttacttgaaagggctaccatttgaagcagaaaacaaacatgtcattgatttttttaaaaagctggatattgtggaagatagtatttatatagcttatggacccaatgggaaagcaactggcgaaggctttgtagagttcagaaatgaggctgactataaggctgctctgtgtcgtcataaacagtacatgggcaatcgctttattcaagttcatccaattactaagaaaggtatgctagaaaagatagatatgattcgaaaaagactgcagaacttcagctatgaccagagggaaatgatactaaatccagagggggatgtcaactctgccaaagtctgtgcccacataacaaatattccattcagcattacaaagatggatgttcttcagttcctagaaggaatcccagtggatgaaaatgctgtacatgttcttgttgataacaatgggcaaggtctaggacaggcattggttcagtttaaaaatgaagatgatgcacgtaagtctgaacgcttacaccgtaaaaaacttaatgggagagaagcttttgttcatgtagttaccctagaagatatgagagagattgagaaaaatccccctgcccaaggaaaaaagggattaaagatgcctgtgccaggtaatcctgcagttccaggaatgcccaatgcgggactgcccggtgtgggactgcccagtgcaggacttcccggtgcaggcctgcccagcacaggactgcctggttcagcaataaccagtgcaggactgcctggtgcgggaatgcccagtgcaggaatacctagtgcaggaggtgaagagcatgccttcctgactgtaggatcaaaggaagccaataatgggcctccatttaactttcctggtaattttggtggatcaaatgcctttgggccaccaatccctcctccaggattaggaggcggggcctttggtgatgctaggcctggtatgccttcagttggaaacagtggtttgcctggtctaggactggatgttccgggttttggaggtggaccaaacaatttaagtgggccatcgggatttggagggggccctcagaattttggaaatggccctggtagcttaggcggtcccccggggtttggaagtggccctcctggtcttggaagtgcccctgggcatttgggtgggccaccagcttttgggcctggccccggccccggccccggccctggcccaatccatattggtggtccccctggctttgcatctagttctggaaaaccaggaccgacagtaattaaagtgcaaaacatgccctttactgtgtctattgatgagattttagatttcttttatggctatcaagtaatcccaggctcagtgtgtttaaaatacaatgaaaaaggtatgcccacaggtgaagccatggtggcctttgagtctcgggatgaagccacagctgctgtcattgacttaaatgacaggcctataggttcaagaaaagtaaaacttgtattagggtagccattcacatcattttttatagggtagatcttcatattgctgtgattaatgcatccagattgttttcctagtatttccaggttagaacctgtggattgtttcaattgcatatagcttggtttccataacatagagcattggttgactgtttacagaagactcactcaccaggataaacattgctgtatgttacagtaaagctatctggagagaacacataaatgattttggcataccattagagaaaccatttgtaaaactcaaatgaccacataaagcttatcaaggagtctagattggttttgttttataccatatgggatgaagaaaatagaaatgtcagtagaactcattgagggtgctcttgccagctgctgaaaatagaagttggctactctcagaatttggtttaaagctggacagatttgctttgttatagggtaaagctttgtctaaagtcctcattttcttttaaaattgaataaaatttctgtatacagattcattgtatgtacctttattgcttcttaagggtccttgctgtatagacagtcctgcttcagaagttgctgctttgtttgtctaattgactcatttgtaaatgagcagaactgttttgttggtttttttccctaaatataaaagtccacacttcgtttgtgctataacctcaaactttgatttctaatgtcacacttaaaactgtgtggaataagacttttgccataaaaataaactatggagtcctttatct

SEQ ID NO: 9776 - protein, 876 aa, Homo sapiens; identical to SEQ ID NO: 9688

SEQ ID NO: 9777 - DNA, 3262 bp, Homo sapiens
gtgaagcggcgaaggaggtggtggctgcgttgggctccgggaagccgttcgggctggggctgtcggccgcggggcggaggcactcgcgcggggggtaattcggggtctgggttctggtgccgcgcagctttccccgtctaaaagttggttttaattggttgcccacaggattgacttggcctctacttcttgttaaggaaattcatctcttgttttatcaggtgtgtgtgtgttccaagcacagcctctccaatgaacacagtcccgccgccaccaattcctccaattccagcgatgccatctctgccaccaatgccatccattcccccaattccagttcctcctccagtacctacattgcctcctgtgcctcctgtgcccccgattcccccagttccttctgtgccacccatgaccccactgccacccatgtcgggcatgccgcccttgaatccgccacctgtggcacctctacctgctggaatgaatggctctggagcacctatgaatttgaacaataatctgaatcctatgtttcttggtccgttgaatcctgttaaccctatccagatgaactctcagagcagtgtgaagccactccccatcaaccctgatgatctgtatgtcagtgtgcatggaatgcccttttctgcaatggaaaatgatgtcagagatttttttcatgggctccgtgttgatgcagtgcatttgttgaaagatcatgtaggtcgaaataatgggaatggattggttaagtttctctcccctcaagatacatttgaagctttgaaacgaaacagaatgctgatgattcaacgctatgtggaagttagccctgccacagaaagacagtgggtagctgctggaggccatatcacttttaagcaaaatatgggaccttctggacaaactcatccccctcctcagacacttcccaggtcaaaatcgcccagtgggcagaaaagatcaaggtcaagatcaccacatgaggctggtttttgtgtttacttgaaagggctaccatttgaagcagaaaacaaacatgtcattgatttttttaaaaagctggatattgtggaagatagtatttatatagcttatggacccaatgggaaagcaactggcgaaggctttgtagagttcagaaatgaggctgactataaggctgctctgtgtcgtcataaacagtacatgggcaatcgctttattcaagttcatccaattactaagaaaggtatgctagaaaagatagatatgattcgaaaaagactgcagaacttcagctatgaccagagggaaatgatactaaatccagagggggatgtcaactctgccaaagtctgtgcccacataacaaatattccattcagcattacaaagatggatgttcttcagttcctagaaggaatcccagtggatgaaaatgctgtacatgttcttgttgataacaatgggcaaggtctaggacaggcattggttcagtttaaaaatgaagatgatgcacgtaagtctgaacgcttacaccgtaaaaaacttaatgggagagaagcttttgttcatgtagttaccctagaagatatgagagagattgagaaaaatccccctgcccaaggaaaaaagggattaaagatgcctgtgccaggtaatcctgcagttccaggaatgcccaatgcgggactgcccggtgtgggactgcccagtgcaggacttcccggtgcaggcctgcccagcacaggactgcctggttcagcaataaccagtgcaggactgcctggtgcgggaatgcccagtgcaggaatacctagtgcaggaggtgaagagcatgccttcctgactgtaggatcaaaggaagccaataatgggcctccatttaactttcctggtaattttggtggatcaaatgcctttgggccaccaatccctcctccaggattaggaggcggggcctttggtgatgctaggcctggtatgccttcagttggaaacagtggtttgcctggtctaggactggatgttccgggttttggaggtggaccaaacaatttaagtgggccatcgggatttggagggggccctcagaattttggaaatggccctggtagcttaggcggtcccccggggtttggaagtggccctcctggtcttggaagtgcccctgggcatttgggtgggccaccagcttttgggcctggccccggccccggccccggccctggcccaatccatattggtggtccccctggctttgcatctagttctggaaaaccaggaccgacagtaattaaagtgcaaaacatgccctttactgtgtctattgatgagattttagatttcttttatggctatcaagtaatcccaggctcagtgtgtttaaaatacaatgaaaaaggtatgcccacaggtgaagccatggtggcctttgagtctcgggatgaagccacagctgctgtcattgacttaaatgacaggcctataggttcaagaaaagtaaaacttgtattagggtagccattcacatcattttttatagggtagatcttcatattgctgtgattaatgcatccagattgttttcctagtatttccaggttagaacctgtggattgtttcaattgcatatagcttggtttccataacatagagcattggttgactgtttacagaagactcactcaccaggataaacattgctgtatgttacagtaaagctatctggagagaacacataaatgattttggcataccattagagaaaccatttgtaaaactcaaatgaccacataaagcttatcaaggagtctagattggttttgttttataccatatgggatgaagaaaatagaaatgtcagtagaactcattgagggtgctcttgccagctgctgaaaatagaagttggctactctcagaatttggtttaaagctggacagatttgctttgttatagggtaaagctttgtctaaagtcctcattttcttttaaaattgaataaaatttctgtatacagattcattgtatgtacctttattgcttcttaagggtccttgctgtatagacagtcctgcttcagaagttgctgctttgtttgtctaattgactcatttgtaaatgagcagaactgttttgttggtttttttccctaaatataaaagtccacacttcgtttgtgctataacctcaaactttgatttctaatgtcacacttaaaactgtgtggaataagacttttgccataaaaataaactatggagtcctttatct

SEQ ID NO: 9778 - protein, 751 aa, Homo sapiens; identical to SEQ ID NO: 9694

SEQ ID NO: 9779 - DNA, 3228 bp, Homo sapiens
gtgaagcggcgaaggaggtggtggctgcgttgggctccgggaagccgttcgggctggggctgtcggccgcggggcggaggcactcgcgcggggggtaattcggggtctgggttctggtgccgcgcagctttccccgcgtaggaacagctcctccaaatatgggggcttcctttgggagcccaacgtttagctcaactgttccaagcacagcctctccaatgaacacagtcccgccgccaccaattcctccaattccagcgatgccatctctgccaccaatgccatccattcccccaattccagttcctcctccagtacctacattgcctcctgtgcctcctgtgcccccgattcccccagttccttctgtgccacccatgaccccactgccacccatgtcgggcatgccgcccttgaatccgccacctgtggcacctctacctgctggaatgaatggctctggagcacctatgaatttgaacaataatctgaatcctatgtttcttggtccgttgaatcctgttaaccctatccagatgaactctcagagcagtgtgaagccactccccatcaaccctgatgatctgtatgtcagtgtgcatggaatgcccttttctgcaatggaaaatgatgtcagagatttttttcatgggctccgtgttgatgcagtgcatttgttgaaagatcatgtaggtcgaaataatgggaatggattggttaagtttctctcccctcaagatacatttgaagctttgaaacgaaacagaatgctgatgattcaacgctatgtggaagttagccctgccacagaaagacagtgggtagctgctggaggccatatcacttttaagcaaaatatgggaccttctggacaaactcatccccctcctcagacacttcccaggtcaaaatcgcccagtgggcagaaaagatcaaggtcaagatcaccacatgaggctggtttttgtgtttacttgaaagggctaccatttgaagcagaaaacaaacatgtcattgatttttttaaaaagctggatattgtggaagatagtatttatatagcttatggacccaatgggaaagcaactggcgaaggctttgtagagttcagaaatgaggctgactataaggctgctctgtgtcgtcataaacagtacatgggcaatcgctttattcaagttcatccaattactaagaaaggtatgctagaaaagatagatatgattcgaaaaagactgcagaacttcagctatgaccagagggaaatgatactaaatccagagggggatgtcaactctgccaaagtctgtgcccacataacaaatattccattcagcattacaaagatggatgttcttcagttcctagaaggaatcccagtggatgaaaatgctgtacatgttcttgttgataacaatgggcaaggtctaggacaggcattggttcagtttaaaaatgaagatgatgcacgtaagtctgaacgcttacaccgtaaaaaacttaatgggagagaagcttttgttcatgtagttaccctagaagatatgagagagattgagaaaaatccccctgcccaaggaaaaaagggattaaagatgcctgtgccaggtaatcctgcagttccaggaatgcccaatgcgggactgcccggtgtgggactgcccagtgcaggacttcccggtgcaggcctgcccagcacaggactgcctggttcagcaataaccagtgcaggactgcctggtgcgggaatgcccagtgcaggaatacctagtgcaggaggtgaagagcatgccttcctgactgtaggatcaaaggaagccaataatgggcctccatttaactttcctggtaattttggtggatcaaatgcctttgggccaccaatccctcctccaggattaggaggcggggcctttggtgatgctaggcctggtatgccttcagttggaaacagtggtttgcctggtctaggactggatgttccgggttttggaggtggaccaaacaatttaagtgggccatcgggatttggagggggccctcagaattttggaaatggccctggtagcttaggcggtcccccggggtttggaagtggccctcctggtcttggaagtgcccctgggcatttgggtgggccaccagcttttgggcctggccccggccccggccccggccctggcccaatccatattggtggtccccctggctttgcatctagttctggaaaaccaggaccgacagtaattaaagtgcaaaacatgccctttactgtgtctattgatgagattttagatttcttttatggctatcaagtaatcccaggctcagtgtgtttaaaatacaatgaaaaaggtatgcccacaggtgaagccatggtggcctttgagtctcgggatgaagccacagctgctgtcattgacttaaatgacaggcctataggttcaagaaaagtaaaacttgtattagggtagccattcacatcattttttatagggtagatcttcatattgctgtgattaatgcatccagattgttttcctagtatttccaggttagaacctgtggattgtttcaattgcatatagcttggtttccataacatagagcattggttgactgtttacagaagactcactcaccaggataaacattgctgtatgttacagtaaagctatctggagagaacacataaatgattttggcataccattagagaaaccatttgtaaaactcaaatgaccacataaagcttatcaaggagtctagattggttttgttttataccatatgggatgaagaaaatagaaatgtcagtagaactcattgagggtgctcttgccagctgctgaaaatagaagttggctactctcagaatttggtttaaagctggacagatttgctttgttatagggtaaagctttgtctaaagtcctcattttcttttaaaattgaataaaatttctgtatacagattcattgtatgtacctttattgcttcttaagggtccttgctgtatagacagtcctgcttcagaagttgctgctttgtttgtctaattgactcatttgtaaatgagcagaactgttttgttggtttttttccctaaatataaaagtccacacttcgtttgtgctataacctcaaactttgatttctaatgtcacacttaaaactgtgtggaataagacttttgccataaaaataaactatggagtcctttatct

SEQ ID NO: 9780 - protein, 771 aa, Homo sapiens; identical to SEQ ID NO: 9686

SEQ ID NO: 9781 - DNA, 3168 bp, Homo sapiens
gtgaagcggcgaaggaggtggtggctgcgttgggctccgggaagccgttcgggctggggctgtcggccgcggggcggaggcactcgcgcggggggtaattcggggtctgggttctggtgccgcgcagctttccccgtctaaaagttggttttaattggttgcccacaggattgacttggcctctacttcttgttaaggaaattcatcttctgccaccaatgccatccattcccccaattccagttcctcctccagtacctacattgcctcctgtgcctcctgtgcccccgattcccccagttccttctgtgccacccatgaccccactgccacccatgtcgggcatgccgcccttgaatccgccacctgtggcacctctacctgctggaatgaatggctctggagcacctatgaatttgaacaataatctgaatcctatgtttcttggtccgttgaatcctgttaaccctatccagatgaactctcagagcagtgtgaagccactccccatcaaccctgatgatctgtatgtcagtgtgcatggaatgcccttttctgcaatggaaaatgatgtcagagatttttttcatgggctccgtgttgatgcagtgcatttgttgaaagatcatgtaggtcgaaataatgggaatggattggttaagtttctctcccctcaagatacatttgaagctttgaaacgaaacagaatgctgatgattcaacgctatgtggaagttagccctgccacagaaagacagtgggtagctgctggaggccatatcacttttaagcaaaatatgggaccttctggacaaactcatccccctcctcagacacttcccaggtcaaaatcgcccagtgggcagaaaagatcaaggtcaagatcaccacatgaggctggtttttgtgtttacttgaaagggctaccatttgaagcagaaaacaaacatgtcattgatttttttaaaaagctggatattgtggaagatagtatttatatagcttatggacccaatgggaaagcaactggcgaaggctttgtagagttcagaaatgaggctgactataaggctgctctgtgtcgtcataaacagtacatgggcaatcgctttattcaagttcatccaattactaagaaaggtatgctagaaaagatagatatgattcgaaaaagactgcagaacttcagctatgaccagagggaaatgatactaaatccagagggggatgtcaactctgccaaagtctgtgcccacataacaaatattccattcagcattacaaagatggatgttcttcagttcctagaaggaatcccagtggatgaaaatgctgtacatgttcttgttgataacaatgggcaaggtctaggacaggcattggttcagtttaaaaatgaagatgatgcacgtaagtctgaacgcttacaccgtaaaaaacttaatgggagagaagcttttgttcatgtagttaccctagaagatatgagagagattgagaaaaatccccctgcccaaggaaaaaagggattaaagatgcctgtgccaggtaatcctgcagttccaggaatgcccaatgcgggactgcccggtgtgggactgcccagtgcaggacttcccggtgcaggcctgcccagcacaggactgcctggttcagcaataaccagtgcaggactgcctggtgcgggaatgcccagtgcaggaatacctagtgcaggaggtgaagagcatgccttcctgactgtaggatcaaaggaagccaataatgggcctccatttaactttcctggtaattttggtggatcaaatgcctttgggccaccaatccctcctccaggattaggaggcggggcctttggtgatgctaggcctggtatgccttcagttggaaacagtggtttgcctggtctaggactggatgttccgggttttggaggtggaccaaacaatttaagtgggccatcgggatttggagggggccctcagaattttggaaatggccctggtagcttaggcggtcccccggggtttggaagtggccctcctggtcttggaagtgcccctgggcatttgggtgggccaccagcttttgggcctggccccggccccggccccggccctggcccaatccatattggtggtccccctggctttgcatctagttctggaaaaccaggaccgacagtaattaaagtgcaaaacatgccctttactgtgtctattgatgagattttagatttcttttatggctatcaagtaatcccaggctcagtgtgtttaaaatacaatgaaaaaggtatgcccacaggtgaagccatggtggcctttgagtctcgggatgaagccacagctgctgtcattgacttaaatgacaggcctataggttcaagaaaagtaaaacttgtattagggtagccattcacatcattttttatagggtagatcttcatattgctgtgattaatgcatccagattgttttcctagtatttccaggttagaacctgtggattgtttcaattgcatatagcttggtttccataacatagagcattggttgactgtttacagaagactcactcaccaggataaacattgctgtatgttacagtaaagctatctggagagaacacataaatgattttggcataccattagagaaaccatttgtaaaactcaaatgaccacataaagcttatcaaggagtctagattggttttgttttataccatatgggatgaagaaaatagaaatgtcagtagaactcattgagggtgctcttgccagctgctgaaaatagaagttggctactctcagaatttggtttaaagctggacagatttgctttgttatagggtaaagctttgtctaaagtcctcattttcttttaaaattgaataaaatttctgtatacagattcattgtatgtacctttattgcttcttaagggtccttgctgtatagacagtcctgcttcagaagttgctgctttgtttgtctaattgactcatttgtaaatgagcagaactgttttgttggtttttttccctaaatataaaagtccacacttcgtttgtgctataacctcaaactttgatttctaatgtcacacttaaaactgtgtggaataagacttttgccataaaaataaactatggagtcctttatct

SEQ ID NO: 9782 - protein, 731 aa, Homo sapiens; identical to SEQ ID NO: 9692

SEQ ID NO: 9783 - DNA, 3720 bp, Homo sapiens
ggccattttgtgaagcggcgaaggaggtggtggctgcgttgggctccgggaagccgttcgggctggggctgtcggccgcggggcggaggcactcgcgcggggggtaattcggggtctgggttctggtgccgcgcagctttccccggtgtgtgtggtttcagcgcagcatggctgtggtcatccgtttgcaaggtctcccaattgtggcggggaccatggacattcgccacttcttctctggattgaccattcctgatgggggcgtgcatattgtagggggtgaactgggtgaggctttcatcgtttttgccactgatgaagatgcaaggcttggtatgatgcgcacaggtggtacaattaaagggtcaaaagtaacactattgttgagtagtaagacggaaatgcagaatatgattgaactgagtcgtaggcgttttgaaactgccaacttagatataccaccagcaaatgccagtagatcaggaccaccacctagctcaggaatgagtagcagggtaaacttgcccacaacagtatccaactttaataatccatcacccagtgtagttactgccaccacttctgttcatgaaagcaacaaaaacatacagacattttccacagccagcgtaggaacagctcctccaaatatgggggcttcctttgggagcccaacgtttagctcaactgttccaagcacagcctctccaatgaacacagtcccgccgccaccaattcctccaattccagcgatgccatctctgccaccaatgccatccattcccccaattccagttcctcctccagtacctacattgcctcctgtgcctcctgtgcccccgattcccccagttccttctgtgccacccatgaccccactgccacccatgtcgggcatgccgcccttgaatccgccacctgtggcacctctacctgctggaatgaatggctctggagcacctatgaatttgaacaataatctgaatcctatgtttcttggtccgttgaatcctgttaaccctatccagatgaactctcagagcagtgtgaagccactccccatcaaccctgatgatctgtatgtcagtgtgcatggaatgcccttttctgcaatggaaaatgatgtcagagatttttttcatgggctccgtgttgatgcagtgcatttgttgaaagatcatgtaggtcgaaataatgggaatggattggttaagtttctctcccctcaagatacatttgaagctttgaaacgaaacagaatgctgatgattcaacgctatgtggaagttagccctgccacagaaagacagtgggtagctgctggaggccatatcacttttaagcaaaatatgggaccttctggacaaactcatccccctcctcagacacttcccaggtcaaaatcgcccagtgggcagaaaagatcaaggtcaagatcaccacatgaggctggtttttgtgtttacttgaaagggctaccatttgaagcagaaaacaaacatgtcattgatttttttaaaaagctggatattgtggaagatagtatttatatagcttatggacccaatgggaaagcaactggcgaaggctttgtagagttcagaaatgaggctgactataaggctgctctgtgtcgtcataaacagtacatgggcaatcgctttattcaagttcatccaattactaagaaaggtatgctagaaaagatagatatgattcgaaaaagactgcagaacttcagctatgaccagagggaaatgatactaaatccagagggggatgtcaactctgccaaagtctgtgcccacataacaaatattccattcagcattacaaagatggatgttcttcagttcctagaaggaatcccagtggatgaaaatgctgtacatgttcttgttgataacaatgggcaaggtctaggacaggcattggttcagtttaaaaatgaagatgatgcacgtaagtctgaacgcttacaccgtaaaaaacttaatgggagagaagcttttgttcatgtagttaccctagaagatatgagagagattgagaaaaatccccctgcccaaggaaaaaagggattaaagatgcctgtgccaggtaatcctgcagttccaggaatgcccaatgcgggactgcccggtgtgggactgcccagtgcaggacttcccggtgcaggcctgcccagcacaggactgcctggttcagcaataaccagtgcaggactgcctggtgcgggaatgcccagtgcaggaatacctagtgcaggaggtgaagagcatgccttcctgactgtaggatcaaaggaagccaataatgggcctccatttaactttcctggtaattttggtggatcaaatgcctttgggccaccaatccctcctccaggattaggaggcggggcctttggtgatgctaggcctggtatgccttcagttggaaacagtggtttgcctggtctaggactggatgttccgggttttggaggtggaccaaacaatttaagtgggccatcgggatttggagggggccctcagaattttggaaatggccctggtagcttaggcggtcccccggggtttggaagtggccctcctggtcttggaagtgcccctgggcatttgggtgggccaccagcttttgggcctggccccggccccggccccggccctggcccaatccatattggtggtccccctggctttgcatctagttctggaaaaccaggaccgacagtaattaaagtgcaaaacatgccctttactgtgtctattgatgagattttagatttcttttatggctatcaagtaatcccaggctcagtgtgtttaaaatacaatgaaaaaggtatgcccacaggtgaagccatggtggcctttgagtctcgggatgaagccacagctgctgtcattgacttaaatgacaggcctataggttcaagaaaagtaaaacttgtattagggtagccattcacatcattttttatagggtagatcttcatattgctgtgattaatgcatccagattgttttcctagtatttccaggttagaacctgtggattgtttcaattgcatatagcttggtttccataacatagagcattggttgactgtttacagaagactcactcaccaggataaacattgctgtatgttacagtaaagctatctggagagaacacataaatgattttggcataccattagagaaaccatttgtaaaactcaaatgaccacataaagcttatcaaggagtctagattggttttgttttataccatatgggatgaagaaaatagaaatgtcagtagaactcattgagggtgctcttgccagctgctgaaaatagaagttggctactctcagaatttggtttaaagctggacagatttgctttgttatagggtaaagctttgtctaaagtcctcattttcttttaaaattgaataaaatttctgtatacagattcattgtatgtacctttattgcttcttaagggtccttgctgtatagacagtcctgcttcagaagttgctgctttgtttgtctaattgactcatttgtaaatgagcagaactgttttgttggtttttttccctaaatataaaagtccacacttcgtttgtgctataacctcaaactttgatttctaatgtcacacttaaaactgtgtggaataagacttttgccataaaaataaactatggagtcctttatct

SEQ ID NO: 9784 - protein, 932 aa, Homo sapiens; identical to SEQ ID NO: 1239

SEQ ID NO: 9785 - DNA, 2982 bp, Homo sapiens
ggccattttgtgaagcggcgaaggaggtggtggctgcgttgggctccgggaagccgttcgggctggggctgtcggccgcggggcggaggcactcgcgcggggggtaattcggggtctgggttctggtgccgcgcagctttccccgtctaaaagttggttttaattggttgcccacaggattgacttggcctctacctgctggaatgaatggctctggagcacctatgaatttgaacaataatctgaatcctatgtttcttggtccgttgaatcctgttaaccctatccagatgaactctcagagcagtgtgaagccactccccatcaaccctgatgatctgtatgtcagtgtgcatggaatgcccttttctgcaatggaaaatgatgtcagagatttttttcatgggctccgtgttgatgcagtgcatttgttgaaagatcatgtaggtcgaaataatgggaatggattggttaagtttctctcccctcaagatacatttgaagctttgaaacgaaacagaatgctgatgattcaacgctatgtggaagttagccctgccacagaaagacagtgggtagctgctggaggccatatcacttttaagcaaaatatgggaccttctggacaaactcatccccctcctcagacacttcccaggtcaaaatcgcccagtgggcagaaaagatcaaggtcaagatcaccacatgaggctggtttttgtgtttacttgaaagggctaccatttgaagcagaaaacaaacatgtcattgatttttttaaaaagctggatattgtggaagatagtatttatatagcttatggacccaatgggaaagcaactggcgaaggctttgtagagttcagaaatgaggctgactataaggctgctctgtgtcgtcataaacagtacatgggcaatcgctttattcaagttcatccaattactaagaaaggtatgctagaaaagatagatatgattcgaaaaagactgcagaacttcagctatgaccagagggaaatgatactaaatccagagggggatgtcaactctgccaaagtctgtgcccacataacaaatattccattcagcattacaaagatggatgttcttcagttcctagaaggaatcccagtggatgaaaatgctgtacatgttcttgttgataacaatgggcaaggtctaggacaggcattggttcagtttaaaaatgaagatgatgcacgtaagtctgaacgcttacaccgtaaaaaacttaatgggagagaagcttttgttcatgtagttaccctagaagatatgagagagattgagaaaaatccccctgcccaaggaaaaaagggattaaagatgcctgtgccaggtaatcctgcagttccaggaatgcccaatgcgggactgcccggtgtgggactgcccagtgcaggacttcccggtgcaggcctgcccagcacaggactgcctggttcagcaataaccagtgcaggactgcctggtgcgggaatgcccagtgcaggaatacctagtgcaggaggtgaagagcatgccttcctgactgtaggatcaaaggaagccaataatgggcctccatttaactttcctggtaattttggtggatcaaatgcctttgggccaccaatccctcctccaggattaggaggcggggcctttggtgatgctaggcctggtatgccttcagttggaaacagtggtttgcctggtctaggactggatgttccgggttttggaggtggaccaaacaatttaagtgggccatcgggatttggagggggccctcagaattttggaaatggccctggtagcttaggcggtcccccggggtttggaagtggccctcctggtcttggaagtgcccctgggcatttgggtgggccaccagcttttgggcctggccccggccccggccccggccctggcccaatccatattggtggtccccctggctttgcatctagttctggaaaaccaggaccgacagtaattaaagtgcaaaacatgccctttactgtgtctattgatgagattttagatttcttttatggctatcaagtaatcccaggctcagtgtgtttaaaatacaatgaaaaaggtatgcccacaggtgaagccatggtggcctttgagtctcgggatgaagccacagctgctgtcattgacttaaatgacaggcctataggttcaagaaaagtaaaacttgtattagggtagccattcacatcattttttatagggtagatcttcatattgctgtgattaatgcatccagattgttttcctagtatttccaggttagaacctgtggattgtttcaattgcatatagcttggtttccataacatagagcattggttgactgtttacagaagactcactcaccaggataaacattgctgtatgttacagtaaagctatctggagagaacacataaatgattttggcataccattagagaaaccatttgtaaaactcaaatgaccacataaagcttatcaaggagtctagattggttttgttttataccatatgggatgaagaaaatagaaatgtcagtagaactcattgagggtgctcttgccagctgctgaaaatagaagttggctactctcagaatttggtttaaagctggacagatttgctttgttatagggtaaagctttgtctaaagtcctcattttcttttaaaattgaataaaatttctgtatacagattcattgtatgtacctttattgcttcttaagggtccttgctgtatagacagtcctgcttcagaagttgctgctttgtttgtctaattgactcatttgtaaatgagcagaactgttttgttggtttttttccctaaatataaaagtccacacttcgtttgtgctataacctcaaactttgatttctaatgtcacacttaaaactgtgtggaataagacttttgccataaaaataaactatggagtcctttatct

SEQ ID NO: 9786 - protein, 674 aa, Homo sapiens; identical to SEQ ID NO: 9698

SEQ ID NO: 9787 - DNA, 2703 bp, Homo sapiens
ggaacgcggagccgctgagcgggccgacggccattttgtgaagcggcgaaggaggtggtggctgcgttgggctccgggaagccgttcgggctggggctgtcggccgcggggcggaggcactcgcgcgggggtctaaaagttggttttaattggttgcccacaggattgacttggcctctacttcttgttaaggaaattcatctcttgttttatcaggtgtgtgtggtttcagcgcagcatggctgtggtcatccgtttgcaaggtctcccaattgtggcggggaccatggacattcgccacttcttctctggattgaccattcctgatgggggcgtgcatattgtagggggtgaactgggtgaggctttcatcgtttttgccactgatgaagatgcaaggcttggtatgatgcgcacaggtggtacaattaaagggtcaaaagtaacactattgttgagtagtaagacggaaatgcagaatatgattgaactgattttttaaaaagctggatattgtggaagatagtatttatatagcttatggacccaatgggaaagcaactggcgaaggctttgtagagttcagaaatgaggctgactataaggctgctctgtgtcgtcataaacagtacatgggcaatcgctttattcaagttcatccaattactaagaaaggtatgctagaaaagatagatatgattcgaaaaagactgcagaacttcagctatgaccagagggaaatgatactaaatccagagggggatgtcaactctgccaaagtctgtgcccacataacaaatattccattcagcattacaaagatggatgttcttcagttcctagaaggaatcccagtggatgaaaatgctgtacatgttcttgttgataacaatgggcaaggtctaggacaggcattggttcagtttaaaaatgaagatgatgcacgtaagtctgaacgcttacaccgtaaaaaacttaatgggagagaagcttttgttcatgtagttaccctagaagatatgagagagattgagaaaaatccccctgcccaaggaaaaaagggattaaagatgcctgtgccaggtaatcctgcagttccaggaatgcccaatgcgggactgcccggtgtgggactgcccagtgcaggacttcccggtgcaggcctgcccagcacaggactgcctggttcagcaataaccagtgcaggactgcctggtgcgggaatgcccagtgcaggaatacctagtgcaggaggtgaagagcatgccttcctgactgtaggatcaaaggaagccaataatgggcctccatttaactttcctggtaattttggtggatcaaatgcctttgggccaccaatccctcctccaggattaggaggcggggcctttggtgatgctaggcctggtatgccttcagttggaaacagtggtttgcctggtctaggactggatgttccgggttttggaggtggaccaaacaatttaagtgggccatcgggatttggagggggccctcagaattttggaaatggccctggtagcttaggcggtcccccggggtttggaagtggccctcctggtcttggaagtgcccctgggcatttgggtgggccaccagcttttgggcctggccccggccccggccccggccctggcccaatccatattggtggtccccctggctttgcatctagttctggaaaaccaggaccgacagtaattaaagtgcaaaacatgccctttactgtgtctattgatgagattttagatttcttttatggctatcaagtaatcccaggctcagtgtgtttaaaatacaatgaaaaaggtatgcccacaggtgaagccatggtggcctttgagtctcgggatgaagccacagctgctgtcattgacttaaatgacaggcctataggttcaagaaaagtaaaacttgtattagggtagccattcacatcattttttatagggtagatcttcatattgctgtgattaatgcatccagattgttttcctagtatttccaggttagaacctgtggattgtttcaattgcatatagcttggtttccataacatagagcattggttgactgtttacagaagactcactcaccaggataaacattgctgtatgttacagtaaagctatctggagagaacacataaatgattttggcataccattagagaaaccatttgtaaaactcaaatgaccacataaagcttatcaaggagtctagattggttttgttttataccatatgggatgaagaaaatagaaatgtcagtagaactcattgagggtgctcttgccagctgctgaaaatagaagttggctactctcagaatttggtttaaagctggacagatttgctttgttatagggtaaagctttgtctaaagtcctcattttcttttaaaattgaataaaatttctgtatacagattcattgtatgtacctttattgcttcttaagggtccttgctgtatagacagtcctgcttcagaagttgctgctttgtttgtctaattgactcatttgtaaatgagcagaactgttttgttggtttttttccctaaatataaaagtccacacttcgtttgtgctataacctcaaactttgatttctaatgtcacacttaaaactgtgtggaataagacttttgccataaaaataaactatggagtcctttatct

SEQ ID NO: 9788 - protein, 87 aa, Homo sapiens; identical to SEQ ID NO: 9700

SEQ ID NO: 9789 - DNA, 3792 bp, Homo sapiens
tggaacgcggagccgctgagcgggccgacggccattttgtgaagcggcgaaggaggtggtggctgcgttgggctccgggaagccgttcgggctggggctgtcggccgcggggcggaggcactcgcgcgggggtctaaaagttggttttaattggttgcccacaggattgacttggcctctacttcttgttaaggaaattcatctcttgttttatcaggtgtgtgtggtttcagcgcagcatggctgtggtcatccgtttgcaaggtctcccaattgtggcggggaccatggacattcgccacttcttctctggattgaccattcctgatgggggcgtgcatattgtagggggtgaactgggtgaggctttcatcgtttttgccactgatgaagatgcaaggcttggtatgatgcgcacaggtggtacaattaaagggtcaaaagtaacactattgttgagtagtaagacggaaatgcagaatatgattgaactgagtcgtaggcgttttgaaactgccaacttagatataccaccagcaaatgccagtagatcaggaccaccacctagctcaggaatgagtagcagggtaaacttgcccacaacagtatccaactttaataatccatcacccagtgtagttactgccaccacttctgttcatgaaagcaacaaaaacatacagacattttccacagccagcgtaggaacagctcctccaaatatgggggcttcctttgggagcccaacgtttagctcaactgttccaagcacagcctctccaatgaacacagtcccgccgccaccaattcctccaattccagcgatgccatctctgccaccaatgccatccattcccccaattccagttcctcctccagtacctacattgcctcctgtgcctcctgtgcccccgattcccccagttccttctgtgccacccatgaccccactgccacccatgtcgggcatgccgcccttgaatccgccacctgtggcacctctacctgctggaatgaatggctctggagcacctatgaatttgaacaataatctgaatcctatgtttcttggtccgttgaatcctgttaaccctatccagatgaactctcagagcagtgtgaagccactccccatcaaccctgatgatctgtatgtcagtgtgcatggaatgcccttttctgcaatggaaaatgatgtcagagatttttttcatgggctccgtgttgatgcagtgcatttgttgaaagatcatgtaggtcgaaataatgggaatggattggttaagtttctctcccctcaagatacatttgaagctttgaaacgaaacagaatgctgatgattcaacgctatgtggaagttagccctgccacagaaagacagtgggtagctgctggaggccatatcacttttaagcaaaatatgggaccttctggacaaactcatccccctcctcagacacttcccaggtcaaaatcgcccagtgggcagaaaagatcaaggtcaagatcaccacatgaggctggtttttgtgtttacttgaaagggctaccatttgaagcagaaaacaaacatgtcattgatttttttaaaaagctggatattgtggaagatagtatttatatagcttatggacccaatgggaaagcaactggcgaaggctttgtagagttcagaaatgaggctgactataaggctgctctgtgtcgtcataaacagtacatgggcaatcgctttattcaagttcatccaattactaagaaaggtatgctagaaaagatagatatgattcgaaaaagactgcagaacttcagctatgaccagagggaaatgatactaaatccagagggggatgtcaactctgccaaagtctgtgcccacataacaaatattccattcagcattacaaagatggatgttcttcagttcctagaaggaatcccagtggatgaaaatgctgtacatgttcttgttgataacaatgggcaaggtctaggacaggcattggttcagtttaaaaatgaagatgatgcacgtaagtctgaacgcttacaccgtaaaaaacttaatgggagagaagcttttgttcatgtagttaccctagaagatatgagagagattgagaaaaatccccctgcccaaggaaaaaagggattaaagatgcctgtgccaggtaatcctgcagttccaggaatgcccaatgcgggactgcccggtgtgggactgcccagtgcaggacttcccggtgcaggcctgcccagcacaggactgcctggttcagcaataaccagtgcaggactgcctggtgcgggaatgcccagtgcaggaatacctagtgcaggaggtgaagagcatgccttcctgactgtaggatcaaaggaagccaataatgggcctccatttaactttcctggtaattttggtggatcaaatgcctttgggccaccaatccctcctccaggattaggaggcggggcctttggtgatgctaggcctggtatgccttcagttggaaacagtggtttgcctggtctaggactggatgttccgggttttggaggtggaccaaacaatttaagtgggccatcgggatttggagggggccctcagaattttggaaatggccctggtagcttaggcggtcccccggggtttggaagtggccctcctggtcttggaagtgcccctgggcatttgggtgggccaccagcttttgggcctggccccggccccggccccggccctggcccaatccatattggtggtccccctggctttgcatctagttctggaaaaccaggaccgacagtaattaaagtgcaaaacatgccctttactgtgtctattgatgagattttagatttcttttatggctatcaagtaatcccaggctcagtgtgtttaaaatacaatgaaaaaggtatgcccacaggtgaagccatggtggcctttgagtctcgggatgaagccacagctgctgtcattgacttaaatgacaggcctataggttcaagaaaagtaaaacttgtattagggtagccattcacatcattttttatagggtagatcttcatattgctgtgattaatgcatccagattgttttcctagtatttccaggttagaacctgtggattgtttcaattgcatatagcttggtttccataacatagagcattggttgactgtttacagaagactcactcaccaggataaacattgctgtatgttacagtaaagctatctggagagaacacataaatgattttggcataccattagagaaaccatttgtaaaactcaaatgaccacataaagcttatcaaggagtctagattggttttgttttataccatatgggatgaagaaaatagaaatgtcagtagaactcattgagggtgctcttgccagctgctgaaaatagaagttggctactctcagaatttggtttaaagctggacagatttgctttgttatagggtaaagctttgtctaaagtcctcattttcttttaaaattgaataaaatttctgtatacagattcattgtatgtacctttattgcttcttaagggtccttgctgtatagacagtcctgcttcagaagttgctgctttgtttgtctaattgactcatttgtaaatgagcagaactgttttgttggtttttttccctaaatataaaagtccacacttcgtttgtgctataacctcaaactttgatttctaatgtcacacttaaaactgtgtggaataagacttttgccataaaaataaactatggagtcctttatct

SEQ ID NO: 9790 - protein, 932 aa, Homo sapiens; identical to SEQ ID NO: 1239

SEQ ID NO: 9791 - DNA, 3838 bp, Homo sapiens
cttctggaacgcggagccgctgagcgggccgacggccattttgtgaagcggcgaaggaggtggtggctgcgttgggctccgggaagccgttcgggctggggctgtcggccgcggggcggaggcactcgcgcggggggtaattcggggtctgggttctggtgccgcgcagctttccccgtctaaaagttggttttaattggttgcccacaggattgacttggcctctacttcttgttaaggaaattcatctcttgttttatcaggtgtgtgtggtttcagcgcagcatggctgtggtcatccgtttgcaaggtctcccaattgtggcggggaccatggacattcgccacttcttctctggattgaccattcctgatgggggcgtgcatattgtagggggtgaactgggtgaggctttcatcgtttttgccactgatgaagatgcaaggcttggtatgatgcgcacaggtggtacaattaaagggtcaaaagtaacactattgttgagtagtaagacggaaatgcagaatatgattgaactgagtcgtaggcgttttgaaactgccaacttagatataccaccagcaaatgccagtagatcaggaccaccacctagctcaggaatgagtagcagggtaaacttgcccacaacagtatccaactttaataatccatcacccagtgtagttactgccaccacttctgttcatgaaagcaacaaaaacatacagacattttccacagccagcgtaggaacagctcctccaaatatgggggcttcctttgggagcccaacgtttagctcaactgttccaagcacagcctctccaatgaacacagtcccgccgccaccaattcctccaattccagcgatgccatctctgccaccaatgccatccattcccccaattccagttcctcctccagtacctacattgcctcctgtgcctcctgtgcccccgattcccccagttccttctgtgccacccatgaccccactgccacccatgtcgggcatgccgcccttgaatccgccacctgtggcacctctacctgctggaatgaatggctctggagcacctatgaatttgaacaataatctgaatcctatgtttcttggtccgttgaatcctgttaaccctatccagatgaactctcagagcagtgtgaagccactccccatcaaccctgatgatctgtatgtcagtgtgcatggaatgcccttttctgcaatggaaaatgatgtcagagatttttttcatgggctccgtgttgatgcagtgcatttgttgaaagatcatgtaggtcgaaataatgggaatggattggttaagtttctctcccctcaagatacatttgaagctttgaaacgaaacagaatgctgatgattcaacgctatgtggaagttagccctgccacagaaagacagtgggtagctgctggaggccatatcacttttaagcaaaatatgggaccttctggacaaactcatccccctcctcagacacttcccaggtcaaaatcgcccagtgggcagaaaagatcaaggtcaagatcaccacatgaggctggtttttgtgtttacttgaaagggctaccatttgaagcagaaaacaaacatgtcattgatttttttaaaaagctggatattgtggaagatagtatttatatagcttatggacccaatgggaaagcaactggcgaaggctttgtagagttcagaaatgaggctgactataaggctgctctgtgtcgtcataaacagtacatgggcaatcgctttattcaagttcatccaattactaagaaaggtatgctagaaaagatagatatgattcgaaaaagactgcagaacttcagctatgaccagagggaaatgatactaaatccagagggggatgtcaactctgccaaagtctgtgcccacataacaaatattccattcagcattacaaagatggatgttcttcagttcctagaaggaatcccagtggatgaaaatgctgtacatgttcttgttgataacaatgggcaaggtctaggacaggcattggttcagtttaaaaatgaagatgatgcacgtaagtctgaacgcttacaccgtaaaaaacttaatgggagagaagcttttgttcatgtagttaccctagaagatatgagagagattgagaaaaatccccctgcccaaggaaaaaagggattaaagatgcctgtgccaggtaatcctgcagttccaggaatgcccaatgcgggactgcccggtgtgggactgcccagtgcaggacttcccggtgcaggcctgcccagcacaggactgcctggttcagcaataaccagtgcaggactgcctggtgcgggaatgcccagtgcaggaatacctagtgcaggaggtgaagagcatgccttcctgactgtaggatcaaaggaagccaataatgggcctccatttaactttcctggtaattttggtggatcaaatgcctttgggccaccaatccctcctccaggattaggaggcggggcctttggtgatgctaggcctggtatgccttcagttggaaacagtggtttgcctggtctaggactggatgttccgggttttggaggtggaccaaacaatttaagtgggccatcgggatttggagggggccctcagaattttggaaatggccctggtagcttaggcggtcccccggggtttggaagtggccctcctggtcttggaagtgcccctgggcatttgggtgggccaccagcttttgggcctggccccggccccggccccggccctggcccaatccatattggtggtccccctggctttgcatctagttctggaaaaccaggaccgacagtaattaaagtgcaaaacatgccctttactgtgtctattgatgagattttagatttcttttatggctatcaagtaatcccaggctcagtgtgtttaaaatacaatgaaaaaggtatgcccacaggtgaagccatggtggcctttgagtctcgggatgaagccacagctgctgtcattgacttaaatgacaggcctataggttcaagaaaagtaaaacttgtattagggtagccattcacatcattttttatagggtagatcttcatattgctgtgattaatgcatccagattgttttcctagtatttccaggttagaacctgtggattgtttcaattgcatatagcttggtttccataacatagagcattggttgactgtttacagaagactcactcaccaggataaacattgctgtatgttacagtaaagctatctggagagaacacataaatgattttggcataccattagagaaaccatttgtaaaactcaaatgaccacataaagcttatcaaggagtctagattggttttgttttataccatatgggatgaagaaaatagaaatgtcagtagaactcattgagggtgctcttgccagctgctgaaaatagaagttggctactctcagaatttggtttaaagctggacagatttgctttgttatagggtaaagctttgtctaaagtcctcattttcttttaaaattgaataaaatttctgtatacagattcattgtatgtacctttattgcttcttaagggtccttgctgtatagacagtcctgcttcagaagttgctgctttgtttgtctaattgactcatttgtaaatgagcagaactgttttgttggtttttttccctaaatataaaagtccacacttcgtttgtgctataacctcaaactttgatttctaatgtcacacttaaaactgtgtggaataagacttttgccataaaaataaactatggagtcctttatct

SEQ ID NO: 9792 - protein, 932 aa, Homo sapiens; identical to SEQ ID NO: 1239

SEQ ID NO: 9793 - DNA, 3706 bp, Homo sapiens
aaccacgccgttcctcccccttctggaacgcggagccgctgagcgggccgacggccattttgtgaagcggcgaaggaggattgacttggcctctacttcttgttaaggaaattcatctcttgttttatcaggtgtgtgtggtttcagcgcagcatggctgtggtcatccgtttgcaaggtctcccaattgtggcggggaccatggacattcgccacttcttctctggattgaccattcctgatgggggcgtgcatattgtagggggtgaactgggtgaggctttcatcgtttttgccactgatgaagatgcaaggcttggtatgatgcgcacaggtggtacaattaaagggtcaaaagtaacactattgttgagtagtaagacggaaatgcagaatatgattgaactgagtcgtaggcgttttgaaactgccaacttagatataccaccagcaaatgccagtagatcaggaccaccacctagctcaggaatgagtagcagggtaaacttgcccacaacagtatccaactttaataatccatcacccagtgtagttactgccaccacttctgttcatgaaagcaacaaaaacatacagacattttccacagccagcgtaggaacagctcctccaaatatgggggcttcctttgggagcccaacgtttagctcaactgttccaagcacagcctctccaatgaacacagtcccgccgccaccaattcctccaattccagcgatgccatctctgccaccaatgccatccattcccccaattccagttcctcctccagtacctacattgcctcctgtgcctcctgtgcccccgattcccccagttccttctgtgccacccatgaccccactgccacccatgtcgggcatgccgcccttgaatccgccacctgtggcacctctacctgctggaatgaatggctctggagcacctatgaatttgaacaataatctgaatcctatgtttcttggtccgttgaatcctgttaaccctatccagatgaactctcagagcagtgtgaagccactccccatcaaccctgatgatctgtatgtcagtgtgcatggaatgcccttttctgcaatggaaaatgatgtcagagatttttttcatgggctccgtgttgatgcagtgcatttgttgaaagatcatgtaggtcgaaataatgggaatggattggttaagtttctctcccctcaagatacatttgaagctttgaaacgaaacagaatgctgatgattcaacgctatgtggaagttagccctgccacagaaagacagtgggtagctgctggaggccatatcacttttaagcaaaatatgggaccttctggacaaactcatccccctcctcagacacttcccaggtcaaaatcgcccagtgggcagaaaagatcaaggtcaagatcaccacatgaggctggtttttgtgtttacttgaaagggctaccatttgaagcagaaaacaaacatgtcattgatttttttaaaaagctggatattgtggaagatagtatttatatagcttatggacccaatgggaaagcaactggcgaaggctttgtagagttcagaaatgaggctgactataaggctgctctgtgtcgtcataaacagtacatgggcaatcgctttattcaagttcatccaattactaagaaaggtatgctagaaaagatagatatgattcgaaaaagactgcagaacttcagctatgaccagagggaaatgatactaaatccagagggggatgtcaactctgccaaagtctgtgcccacataacaaatattccattcagcattacaaagatggatgttcttcagttcctagaaggaatcccagtggatgaaaatgctgtacatgttcttgttgataacaatgggcaaggtctaggacaggcattggttcagtttaaaaatgaagatgatgcacgtaagtctgaacgcttacaccgtaaaaaacttaatgggagagaagcttttgttcatgtagttaccctagaagatatgagagagattgagaaaaatccccctgcccaaggaaaaaagggattaaagatgcctgtgccaggtaatcctgcagttccaggaatgcccaatgcgggactgcccggtgtgggactgcccagtgcaggacttcccggtgcaggcctgcccagcacaggactgcctggttcagcaataaccagtgcaggactgcctggtgcgggaatgcccagtgcaggaatacctagtgcaggaggtgaagagcatgccttcctgactgtaggatcaaaggaagccaataatgggcctccatttaactttcctggtaattttggtggatcaaatgcctttgggccaccaatccctcctccaggattaggaggcggggcctttggtgatgctaggcctggtatgccttcagttggaaacagtggtttgcctggtctaggactggatgttccgggttttggaggtggaccaaacaatttaagtgggccatcgggatttggagggggccctcagaattttggaaatggccctggtagcttaggcggtcccccggggtttggaagtggccctcctggtcttggaagtgcccctgggcatttgggtgggccaccagcttttgggcctggccccggccccggccccggccctggcccaatccatattggtggtccccctggctttgcatctagttctggaaaaccaggaccgacagtaattaaagtgcaaaacatgccctttactgtgtctattgatgagattttagatttcttttatggctatcaagtaatcccaggctcagtgtgtttaaaatacaatgaaaaaggtatgcccacaggtgaagccatggtggcctttgagtctcgggatgaagccacagctgctgtcattgacttaaatgacaggcctataggttcaagaaaagtaaaacttgtattagggtagccattcacatcattttttatagggtagatcttcatattgctgtgattaatgcatccagattgttttcctagtatttccaggttagaacctgtggattgtttcaattgcatatagcttggtttccataacatagagcattggttgactgtttacagaagactcactcaccaggataaacattgctgtatgttacagtaaagctatctggagagaacacataaatgattttggcataccattagagaaaccatttgtaaaactcaaatgaccacataaagcttatcaaggagtctagattggttttgttttataccatatgggatgaagaaaatagaaatgtcagtagaactcattgagggtgctcttgccagctgctgaaaatagaagttggctactctcagaatttggtttaaagctggacagatttgctttgttatagggtaaagctttgtctaaagtcctcattttcttttaaaattgaataaaatttctgtatacagattcattgtatgtacctttattgcttcttaagggtccttgctgtatagacagtcctgcttcagaagttgctgctttgtttgtctaattgactcatttgtaaatgagcagaactgttttgttggtttttttccctaaatataaaagtccacacttcgtttgtgctataacctcaaactttgatttctaatgtcacacttaaaactgtgtggaataagacttttgccataaaaataaactatggagtcctttatct

SEQ ID NO: 9794 - protein, 932 aa, Homo sapiens; identical to SEQ ID NO: 1239

SEQ ID NO: 9795 - DNA, 2305 bp, Homo sapiens
gaatgaatggctctggagcacctatgaatttgaacaataatctgaatcctatgtttcttggtccgttgaatcctgttaaccctatccagatgaactctcagagcagtgtgaagccactccccatcaaccctgatgatctgtatgtcagtgtgcatggaatgcccttttctgcaatggaaaatgatgtcagagatttttttcatgggctccgtgttgatgcagtgcatttgttgaaagatcatgtaggtcgaaataatgggaatggattggttaagtttctctcccctcaagatacatttgaagctttgaaacgaaacagaatgctgatgattcaacgctatgtggaagttagccctgccacagaaagacagtgggtagctgctggaggccatatcacttttaagcaaaatatgggaccttctggacaaactcatccccctcctcagacacttcccaggtcaaaatcgcccagtgggcagaaaagatcaaggtcaagatcaccacatgaggctggtttttgtgtttacttgaaagggctaccatttgaagcagaaaacaaacatgtcattgatttttttaaaaagctggatattgtggaagatagtatttatatagcttatggacccaatgggaaagcaactggcgaaggctttgtagagttcagaaatgaggctgactataaggctgctctgtgtcgtcataaacagtacatgggcaatcgctttattcaagttcatccaattactaagaaaggtatgctagaaaagatagatatgattcgaaaaagactgcagaacttcagctatgaccagagggaaatgatactaaatccagagggggatgtcaactctgccaaattaccctagaagatatgagagagattgagaaaaatccccctgcccaaggaaaaaagggattaaagatgcctgtgccaggtaatcctgcagttccaggaatgcccaatgcgggactgcccggtgtgggactgcccagtgcaggacttcccggtgcaggcctgcccagcacaggactgcctggttcagcaataaccagtgcaggactgcctggtgcgggaatgcccagtgcaggaatacctagtgcaggaggtgaagagcatgccttcctgactgtaggatcaaaggaagccaataatgggcctccatttaactttcctggtaattttggtggatcaaatgcctttgggccaccaatccctcctccaggattaggaggcggggcctttggtgatgctaggcctggtatgccttcagttggaaacagtggtttgcctggtctaggactggatgttccgggttttggaggtggaccaaacaatttaagtgggccatcgggatttggagggggccctcagaattttggaaatggccctggtagcttaggcggtcccccggggtttggaagtggccctcctggtcttggaagtgcccctgggcatttgggtgggccaccagcttttgggcctggccccggccccggccccggccctggcccaatccatattggtggtccccctggctttgcatctagttctggaaaaccaggaccgacagtaattaaagtgcaaaacatgccctttactgtgtctattgatgagattttagatttcttttatggctatcaagtaatcccaggctcagtgtgtttaaaatacaatgaaaaaggtatgcccacaggtgaagccatggtggcctttgagtctcgggatgaagccacagctgctgtcattgacttaaatgacaggcctataggttcaagaaaagtaaaacttgtattagggtagccattcacatcattttttatagggtagatcttcatattgctgtgattaatgcatccagattgttttcctagtatttccaggttagaacctgtggattgtttcaattgcatatagcttggtttccataacatagagcattggttgactgtttacagaagactcactcaccaggataaacattgctgtatgttacagtaaagctatctggagagaacacataaatgattttggcataccattagagaaaccatttgtaaaactcaaatgaccacataaagcttatcaaggagtctagattggttttgttttataccatatgggatgaagaaaatagaaatgtcagtagaactcattgagggtgctcttgccagctgctgaaaatagaagttggctactctcagaatttggtttaaagctggacagatttgctttgttatagggtaaagctttgtctaaagtcctcattttcttttaaaattgaataaaatttctgtatacagattc

SEQ ID NO: 9796 - protein, 287 aa, Homo sapiens; identical to SEQ ID NO: 9678

SEQ ID NO: 9797 - DNA, 2476 bp, Homo sapiens
ttgcctcctgtgcctcctgtgcccccgattcccccagttccttctgtgccacccatgaccccactgccacccatgtcgggcatgccgcccttgaatccgccacctgtggcacctctacctgctggaatgaatggctctggagcacctatgaatttgaacaataatctgaatcctatgtttcttggtccgttgaatcctgttaaccctatccagatgaactctcagagcagtgtgaagccactccccatcaaccctgatgatctgtatgtcagtgtgcatggaatgcccttttctgcaatggaaaatgatgtcagagatttttttcatgggctccgtgttgatgcagtgcatttgttgaaagatcatgtaggtcgaaataatgggaatggattggttaagtttctctcccctcaagatacatttgaagctttgaaacgaaacagaatgctgatgattcaacgctatgtggaagttagccctgccacagaaagacagtgggtagctgctggaggccatatcacttttaagcaaaatatgggaccttctggacaaactcatccccctcctcagacacttcccaggtcaaaatcgcccagtgggcagaaaagatcaaggtcaagatcaccacatgaggctggtttttgtgtttacttgaaagggctaccatttgaagcagaaaacaaacatgtcattgatttttttaaaaagctggatattgtggaagatagtatttatatagcttatggacccaatgggaaagcaactggcgaaggctttgtagagttcagaaatgaggctgactataaggctgctctgtgtcgtcataaacagtacatgggcaatcgctttattcaagttcatccaattactaagaaaggtatgctagaaaagatagatatgattcgaaaaagactgcagaacttcagctatgaccagagggaaatgatactaaatccagagggggatgtcaactctgccaaagtctgtgcccacataacaaatattccattcagcattacaaagatggatgttcttcagttcctagaaggaatcccagtggatgaaaatgctgtacatgttcttgttgataacaatgggcaaggtctaggacaggcattggttcagaatgcccaatgcgggactgcccggtgtgggactgcccagtgcaggacttcccggtgcaggcctgcccagcacaggactgcctggttcagcaataaccagtgcaggactgcctggtgcgggaatgcccagtgcaggaatacctagtgcaggaggtgaagagcatgccttcctgactgtaggatcaaaggaagccaataatgggcctccatttaactttcctggtaattttggtggatcaaatgcctttgggccaccaatccctcctccaggattaggaggcggggcctttggtgatgctaggcctggtatgccttcagttggaaacagtggtttgcctggtctaggactggatgttccgggttttggaggtggaccaaacaatttaagtgggccatcgggatttggagggggccctcagaattttggaaatggccctggtagcttaggcggtcccccggggtttggaagtggccctcctggtcttggaagtgcccctgggcatttgggtgggccaccagcttttgggcctggccccggccccggccccggccctggcccaatccatattggtggtccccctggctttgcatctagttctggaaaaccaggaccgacagtaattaaagtgcaaaacatgccctttactgtgtctattgatgagattttagatttcttttatggctatcaagtaatcccaggctcagtgtgtttaaaatacaatgaaaaaggtatgcccacaggtgaagccatggtggcctttgagtctcgggatgaagccacagctgctgtcattgacttaaatgacaggcctataggttcaagaaaagtaaaacttgtattagggtagccattcacatcattttttatagggtagatcttcatattgctgtgattaatgcatccagattgttttcctagtatttccaggttagaacctgtggattgtttcaattgcatatagcttggtttccataacatagagcattggttgactgtttacagaagactcactcaccaggataaacattgctgtatgttacagtaaagctatctggagagaacacataaatgattttggcataccattagagaaaccatttgtaaaactcaaatgaccacataaagcttatcaaggagtctagattggttttgttttataccatatgggatgaagaaaatagaaatgtcagtagaactcattgagggtgctcttgccagctgctgaaaatagaagttggctactctcagaatttggtttaaagctggacagatttgctttgttatagggtaaagctttgtctaaagtcctcattttcttttaaaattgaataaaatttctgtatacagattc

SEQ ID NO: 9798 - protein, 404 aa, Homo sapiens; identical to SEQ ID NO: 9680

SEQ ID NO: 9799 - DNA, 3232 bp, Homo sapiens
caggtgtgtgtggtttcagcgcagcatggctgtggtcatccgtttgcaaggtctcccaattgtggcggggaccatggacattcgccacttcttctctggattgaccattcctgatgggggcgtgcatattgtagggggtgaactgggtgaggctttcatcgtttttgccactgatgaagatgcaaggcttggtatgatgcgcacaggtggtacaattaaagggtcaaaagtaacactattgttgagtagtaagacggaaatgcagaatatgattgaactgagtcgtaggcgttttgaaactgccaacttagatataccaccagcaaatgccagtagatcaggaccaccacctagctcaggaatgagtagcagggtaaacttgcccacaacagtatccaactttaataatccatcacccagtgtagttactgccaccacttctgttcatgaaagcaacaaaaacatacagacattttccacagccagcgtaggaacagctcctccaaatatgggggcttcctttgggagcccaacgtttagctcaactgttccaagcacagcctctccaatgaacacagtcccgccgccaccaattcctccaattccagcgatgccatcttctgtgccacccatgaccccactgccacccatgtcgggcatgccgcccttgaatccgccacctgtggcacctctacctgctggaatgaatggctctggagcacctatgaatttgaacaataatctgaatcctatgtttcttggtccgttgaatcctgttaaccctatccagatgaactctcagagcagtgtgaagccactccccatcaaccctgatgatctgtatgtcagtgtgcatggaatgcccttttctgcaatggaaaatgatgtcagagatttttttcatgggctccgtgttgatgcagtgcatttgttgaaagatcatgtaggtcgaaataatgggaatggattggttaagtttctctcccctcaagatacatttgaagctttgaaacgaaacagaatgctgatgattcaacgctatgtggaagttagccctgccacagaaagacagtgggtagctgctggaggccatatcacttttaagcaaaatatgggaccttctggacaaactcatccccctcctcagacacttcccaggtcaaaatcgcccagtgggcagaaaagatcaaggtcaagatcaccacatgaggctggtttttgtgtttacttgaaagggctaccatttgaagcagaaaacaaacatgtcattgatttttttaaaaagctggatattgtggaagatagtatttatatagcttatggacccaatgggaaagcaactggcgaaggctttgtagagttcagaaatgaggctgactataaggctgctctgtgtcgtcataaacagtacatgggcaatcgctttattcaagttcatccaattactaagaaaggtatgctagaaaagatagatatgattcgaaaaagactgcagaacttcagctatgaccagagggaaatgatactaaatccagagggggatgtcaactctgccaaagtctgtgcccacataacaaatattccattcagcattacaaagatggatgttcttcagttcctagaaggaatcccagtggatgaaaatgctgtacatgttcttgttgataacaatgggcaaggtctaggacaggcattggttcagtttaaaaatgaagatgatgcacgtaagtctgaacgcttacaccgtaaaaaacttaatgggagagaagcttttgttcatgtagttaccctagaagatatgagagagattgagaaaaatccccctgcccaaggaaaaaagggattaaagatgcctgtgccaggtaatcctgcagttccaggaatgcccaatgcgggactgcccggtgtgggactgcccagtgcaggacttcccggtgcaggcctgcccagcacaggactgcctggttcagcaataaccagtgcaggactgcctggtgcgggaatgcccagtgcaggaatacctagtgcaggaggtgaagagcatgccttcctgactgtaggatcaaaggaagccaataatgggcctccatttaactttcctggtaattttggtggatcaaatgcctttgggccaccaatccctcctccaggattaggaggcggggcctttggtgatgctaggcctggtatgccttcagttggaaacagtggtttgcctggtctaggactggatgttccgggttttggaggtggaccaaacaatttaagtgggccatcgggatttggagggggccctcagaattttggaaatggccctggtagcttaggcggtcccccggggtttggaagtggccctcctggtcttggaagtgcccctgggcatttgggtgggccaccagcttttgggcctggccccggccccggccccggccctggcccaatccatattggtggtccccctggctttgcatctagttctggaaaaccaggaccgacagtaattaaagtgcaaaacatgccctttactgtgtctattgatgagattttagatttcttttatggctatcaagtaatcccaggctcagtgtgtttaaaatacaatgaaaaaggtatgcccacaggtgaagccatggtggcctttgagtctcgggatgaagccacagctgctgtcattgacttaaatgacaggcctataggttcaagaaaagtaaaacttgtattagggtagccattcacatcattttttatagggtagatcttcatattgctgtgattaatgcatccagattgttttcctagtatttccaggttagaacctgtggattgtttcaattgcatatagcttggtttccataacatagagcattggttgactgtttacagaagactcactcaccaggataaacattgctgtatgttacagtaaagctatctggagagaacacataaatgattttggcataccattagagaaaccatttgtaaaactcaaatgaccacataaagcttatcaaggagtctagattggttttgttttataccatatgggatgaagaaaatagaaatgtcagtagaactcattgagggtgctcttgccagctgctgaaaatagaagttggctactctcagaatttggtttaaagctggacagatttgctttgttatagggtaaagctttgtctaaagtcctcattttcttttaaaattgaataaaatttctgtatacagattc

SEQ ID NO: 9800 - protein, 900 aa, Homo sapiens; identical to SEQ ID NO: 9682

SEQ ID NO: 9801 - DNA, 3494 bp, Homo sapiens
gaaatgcctccgaggtccattgctggggaggggctttactcgagggtgtagcagttttgagaagccggcgtctgaagctaggagtctaaaagttggttttaattggttgcccacaggattgacttggcctctacttcttgttaaggaaattcatctcttgttttatcaggtgtgtgtggtttcagcgcagcatggctgtggtcatccgtttgcaaggtctcccaattgtggcggggaccatggacattcgccacttcttctctggattgaccattcctgatgggggcgtgcatattgtagggggtgaactgggtgaggctttcatcgtttttgccactgatgaagatgcaaggcttggtatgatgcgcacaggtggtacaattaaagggtcaaaagtaacactattgttgagtagtaagacggaaatgcagaatatgattgaactgagtcgtaggcgttttgaaactgccaacttagatataccaccagcaaatgccagtagatcaggaccaccacctagctcaggaatgagtagcagggtaaacttgcccacaacagtatccaactttaataatccatcacccagtgtagttactgccaccacttctgttcatgaaagcaacaaaaacatacagacattttccacagccagcgtaggaacagctcctccaaatatgggggcttcctttgggagcccaacgtttagctcaactgttccaagcacagcctctccaatgaacacagtcccgccgccaccaattcctccaattccagcgatgccatctctgccaccaatgccatccattcccccaattccagttcctcctccagtacctacattgcctcctgtgcctcctgtgcccccgattcccccagttccttctgtgccacccatgaccccactgccacccatgtcgggcatgccgcccttgaatccgccacctgtggcacctctacctgctggaatgaatggctctggagcacctatgaatttgaacaataatctgaatcctatgtttcttggtccgttgaatcctgttaaccctatccagatgaactctcagagcagtgtgaagccactccccatcaaccctgatgatctgtatgtcagtgtgcatggaatgcccttttctgcaatggaaaatgatgtcagagatttttttcatgggctccgtgttgatgcagtgcatttgttgaaagatcatgtaggtcgaaataatgggaatggattggttaagtttctctcccctcaagatacatttgaagctttgaaacgaaacagaatgctgatgattcaacgctatgtggaagttagccctgccacagaaagacagtgggtagctgctggaggccatatcacttttaagcaaaatatgggaccttctggacaaactcatccccctcctcagacacttcccaggtcaaaatcgcccagtgggcagaaaagatcaaggtcaagatcaccacatgaggctggtttttgtgtttacttgaaagggctaccatttgaagcagaaaacaaacatgtcattgatttttttaaaaagctggatattgtggaagatagtatttatatagcttatggacccaatgggaaagcaactggcgaaggctttgtagagttcagaaatgaggctgactataaggctgctctgtgtcgtcataaacagtacatgggcaatcgctttattcaagttcatccaattactaagaaaggtatgctagaaaagatagatatgattcgaaaaagactgcagaacttcagctatgaccagagggaaatgatactaaatccagagggggatgtcaactctgccaaagtctgtgcccacataacaaatattccattcagcattacaaagatggatgttcttcagttcctagaaggaatcccagtggatgaaaatgctgtacatgttcttgttgataacaatgggcaaggtctaggacaggcattggttcagtttaaaaatgaagatgatgcacgtaagtctgaacgcttacaccgtaaaaaacttaatgggagagaagcttttgttcatgtagttaccctagaagatatgagagagattgagaaaaatccccctgcccaaggaaaaaagggattaaagatgcctgtgccaggtaatcctgcagttccaggaatgcccaatgcgggactgcccggtgtgggactgcccagtgcaggacttcccggtgcaggcctgcccagcacaggactgcctggttcagcaataaccagtgcaggactgcctggtgcgggaatgcccagtgcaggaatacctagtgcaggaggtgaagagcatgccttcctgactgtaggatcaaaggaagccaataatgggcctccatttaactttcctggtaattttggtggatcaaatgcctttgggccaccaatccctcctccaggattaggaggcggggcctttggtgatgctaggcctggtatgccttcagttggaaacagtggtttgcctggtctaggactggatgttccgggttttggaggtggaccaaacaatttaagtgggccatcgggatttggagggggccctcagaattttggaaatggccctggtagcttaggcggtcccccggggtttggaagtggccctcctggtcttggaagtgcccctgggcatttgggtgggccaccagcttttgggcctggccccggccccggccccggccctggcccaatccatattggtggtccccctggctttgcatctagttctggaaaaccaggaccgacagtaattaaagtgcaaaacatgccctttactgtgtctattgatgagattttagatttcttttatggctatcaagtaatcccaggctcagtgtgtttaaaatacaatgaaaaaggtatgcccacaggtgaagccatggtggcctttgagtctcgggatgaagccacagctgctgtcattgacttaaatgacaggcctataggttcaagaaaagtaaaacttgtattagggtagccattcacatcattttttatagggtagatcttcatattgctgtgattaatgcatccagattgttttcctagtatttccaggttagaacctgtggattgtttcaattgcatatagcttggtttccataacatagagcattggttgactgtttacagaagactcactcaccaggataaacattgctgtatgttacagtaaagctatctggagagaacacataaatgattttggcataccattagagaaaccatttgtaaaactcaaatgaccacataaagcttatcaaggagtctagattggttttgttttataccatatgggatgaagaaaatagaaatgtcagtagaactcattgagggtgctcttgccagctgctgaaaatagaagttggctactctcagaatttggtttaaagctggacagatttgctttgttatagggtaaagctttgtctaaagtcctcattttcttttaaaattgaataaaatttctgtatacagattc

SEQ ID NO: 9802 - protein, 932 aa, Homo sapiens; identical to SEQ ID NO: 1239

SEQ ID NO: 9803 - DNA, 3403 bp, Homo sapiens
gtgaagcggcgaaggaggtggtggctgcgttgggctccgggaagccgttcgggctggggctgtcggccgcggggcggaggcactcgcgcggggggtaattcggggtctgggttctggtgccgcgcagctttccccgtctaaaagttggttttaattggttgcccacaggattgacttggccattcctgatgggggcgtgcatattgtagggggtgaactgggtgaggctttcatcgtttttgccactgatgaagatgcaaggcttggtatgatgcgcacaggtggtacaattaaagggtcaaaagtaacactattgttgagtagtaagacggaaatgcagaatatgattgaactgagtcgtaggcgttttgaaactgccaacttagatataccaccagcaaatgccagtagatcaggaccaccacctagctcaggaatgagtagcagggtaaacttgcccacaacagtatccaactttaataatccatcacccagtgtagttactgccaccacttctgttcatgaaagcaacaaaaacatacagacattttccacagccagcgtaggaacagctcctccaaatatgggggcttcctttgggagcccaacgtttagctcaactgttccaagcacagcctctccaatgaacacagtcccgccgccaccaattcctccaattccagcgatgccatctctgccaccaatgccatccattcccccaattccagttcctcctccagtacctacattgcctcctgtgcctcctgtgcccccgattcccccagttccttctgtgccacccatgaccccactgccacccatgtcgggcatgccgcccttgaatccgccacctgtggcacctctacctgctggaatgaatggctctggagcacctatgaatttgaacaataatctgaatcctatgtttcttggtccgttgaatcctgttaaccctatccagatgaactctcagagcagtgtgaagccactccccatcaaccctgatgatctgtatgtcagtgtgcatggaatgcccttttctgcaatggaaaatgatgtcagagatttttttcatgggctccgtgttgatgcagtgcatttgttgaaagatcatgtaggtcgaaataatgggaatggattggttaagtttctctcccctcaagatacatttgaagctttgaaacgaaacagaatgctgatgattcaacgctatgtggaagttagccctgccacagaaagacagtgggtagctgctggaggccatatcacttttaagcaaaatatgggaccttctggacaaactcatccccctcctcagacacttcccaggtcaaaatcgcccagtgggcagaaaagatcaaggtcaagatcaccacatgaggctggtttttgtgtttacttgaaagggctaccatttgaagcagaaaacaaacatgtcattgatttttttaaaaagctggatattgtggaagatagtatttatatagcttatggacccaatgggaaagcaactggcgaaggctttgtagagttcagaaatgaggctgactataaggctgctctgtgtcgtcataaacagtacatgggcaatcgctttattcaagttcatccaattactaagaaaggtatgctagaaaagatagatatgattcgaaaaagactgcagaacttcagctatgaccagagggaaatgatactaaatccagagggggatgtcaactctgccaaagtctgtgcccacataacaaatattccattcagcattacaaagatggatgttcttcagttcctagaaggaatcccagtggatgaaaatgctgtacatgttcttgttgataacaatgggcaaggtctaggacaggcattggttcagtttaaaaatgaagatgatgcacgtaagtctgaacgcttacaccgtaaaaaacttaatgggagagaagcttttgttcatgtagttaccctagaagatatgagagagattgagaaaaatccccctgcccaaggaaaaaagggattaaagatgcctgtgccaggtaatcctgcagttccaggaatgcccaatgcgggactgcccggtgtgggactgcccagtgcaggacttcccggtgcaggcctgcccagcacaggactgcctggttcagcaataaccagtgcaggactgcctggtgcgggaatgcccagtgcaggaatacctagtgcaggaggtgaagagcatgccttcctgactgtaggatcaaaggaagccaataatgggcctccatttaactttcctggtaattttggtggatcaaatgcctttgggccaccaatccctcctccaggattaggaggcggggcctttggtgatgctaggcctggtatgccttcagttggaaacagtggtttgcctggtctaggactggatgttccgggttttggaggtggaccaaacaatttaagtgggccatcgggatttggagggggccctcagaattttggaaatggccctggtagcttaggcggtcccccggggtttggaagtggccctcctggtcttggaagtgcccctgggcatttgggtgggccaccagcttttgggcctggccccggccccggccccggccctggcccaatccatattggtggtccccctggctttgcatctagttctggaaaaccaggaccgacagtaattaaagtgcaaaacatgccctttactgtgtctattgatgagattttagatttcttttatggctatcaagtaatcccaggctcagtgtgtttaaaatacaatgaaaaaggtatgcccacaggtgaagccatggtggcctttgagtctcgggatgaagccacagctgctgtcattgacttaaatgacaggcctataggttcaagaaaagtaaaacttgtattagggtagccattcacatcattttttatagggtagatcttcatattgctgtgattaatgcatccagattgttttcctagtatttccaggttagaacctgtggattgtttcaattgcatatagcttggtttccataacatagagcattggttgactgtttacagaagactcactcaccaggataaacattgctgtatgttacagtaaagctatctggagagaacacataaatgattttggcataccattagagaaaccatttgtaaaactcaaatgaccacataaagcttatcaaggagtctagattggttttgttttataccatatgggatgaagaaaatagaaatgtcagtagaactcattgagggtgctcttgccagctgctgaaaatagaagttggctactctcagaatttggtttaaagctggacagatttgctttgttatagggtaaagctttgtctaaagtcctcattttcttttaaaattgaataaaatttctgtatacagattc

SEQ ID NO: 9804 - protein, 876 aa, Homo sapiens; identical to SEQ ID NO: 9688

SEQ ID NO: 9805 - DNA, 2918 bp, Homo sapiens
gtgaagcggcgaaggaggtggtggctgcgttgggctccgggaagccgttcgggctggggctgtcggccgcggggcggaggcactcgcgcggggggtaattcggggtctgggttctggtgccgcgcagctttccccgtctaaaagttggttttaattggttgcccacaggattgacttggcctctacttcttgttaaggaaattcatcttctgccaccaatgccatccattcccccaattccagttcctcctccagtacctacattgcctcctgtgcctcctgtgcccccgattcccccagttccttctgtgccacccatgaccccactgccacccatgtcgggcatgccgcccttgaatccgccacctgtggcacctctacctgctggaatgaatggctctggagcacctatgaatttgaacaataatctgaatcctatgtttcttggtccgttgaatcctgttaaccctatccagatgaactctcagagcagtgtgaagccactccccatcaaccctgatgatctgtatgtcagtgtgcatggaatgcccttttctgcaatggaaaatgatgtcagagatttttttcatgggctccgtgttgatgcagtgcatttgttgaaagatcatgtaggtcgaaataatgggaatggattggttaagtttctctcccctcaagatacatttgaagctttgaaacgaaacagaatgctgatgattcaacgctatgtggaagttagccctgccacagaaagacagtgggtagctgctggaggccatatcacttttaagcaaaatatgggaccttctggacaaactcatccccctcctcagacacttcccaggtcaaaatcgcccagtgggcagaaaagatcaaggtcaagatcaccacatgaggctggtttttgtgtttacttgaaagggctaccatttgaagcagaaaacaaacatgtcattgatttttttaaaaagctggatattgtggaagatagtatttatatagcttatggacccaatgggaaagcaactggcgaaggctttgtagagttcagaaatgaggctgactataaggctgctctgtgtcgtcataaacagtacatgggcaatcgctttattcaagttcatccaattactaagaaaggtatgctagaaaagatagatatgattcgaaaaagactgcagaacttcagctatgaccagagggaaatgatactaaatccagagggggatgtcaactctgccaaagtctgtgcccacataacaaatattccattcagcattacaaagatggatgttcttcagttcctagaaggaatcccagtggatgaaaatgctgtacatgttcttgttgataacaatgggcaaggtctaggacaggcattggttcagtttaaaaatgaagatgatgcacgtaagtctgaacgcttacaccgtaaaaaacttaatgggagagaagcttttgttcatgtagttaccctagaagatatgagagagattgagaaaaatccccctgcccaaggaaaaaagggattaaagatgcctgtgccaggtaatcctgcagttccaggaatgcccaatgcgggactgcccggtgtgggactgcccagtgcaggacttcccggtgcaggcctgcccagcacaggactgcctggttcagcaataaccagtgcaggactgcctggtgcgggaatgcccagtgcaggaatacctagtgcaggaggtgaagagcatgccttcctgactgtaggatcaaaggaagccaataatgggcctccatttaactttcctggtaattttggtggatcaaatgcctttgggccaccaatccctcctccaggattaggaggcggggcctttggtgatgctaggcctggtatgccttcagttggaaacagtggtttgcctggtctaggactggatgttccgggttttggaggtggaccaaacaatttaagtgggccatcgggatttggagggggccctcagaattttggaaatggccctggtagcttaggcggtcccccggggtttggaagtggccctcctggtcttggaagtgcccctgggcatttgggtgggccaccagcttttgggcctggccccggccccggccccggccctggcccaatccatattggtggtccccctggctttgcatctagttctggaaaaccaggaccgacagtaattaaagtgcaaaacatgccctttactgtgtctattgatgagattttagatttcttttatggctatcaagtaatcccaggctcagtgtgtttaaaatacaatgaaaaaggtatgcccacaggtgaagccatggtggcctttgagtctcgggatgaagccacagctgctgtcattgacttaaatgacaggcctataggttcaagaaaagtaaaacttgtattagggtagccattcacatcattttttatagggtagatcttcatattgctgtgattaatgcatccagattgttttcctagtatttccaggttagaacctgtggattgtttcaattgcatatagcttggtttccataacatagagcattggttgactgtttacagaagactcactcaccaggataaacattgctgtatgttacagtaaagctatctggagagaacacataaatgattttggcataccattagagaaaccatttgtaaaactcaaatgaccacataaagcttatcaaggagtctagattggttttgttttataccatatgggatgaagaaaatagaaatgtcagtagaactcattgagggtgctcttgccagctgctgaaaatagaagttggctactctcagaatttggtttaaagctggacagatttgctttgttatagggtaaagctttgtctaaagtcctcattttcttttaaaattgaataaaatttctgtatacagattc

SEQ ID NO: 9806 - protein, 731 aa, Homo sapiens; identical to SEQ ID NO: 9692

SEQ ID NO: 9807 - DNA, 3012 bp, Homo sapiens
gtgaagcggcgaaggaggtggtggctgcgttgggctccgggaagccgttcgggctggggctgtcggccgcggggcggaggcactcgcgcggggggtaattcggggtctgggttctggtgccgcgcagctttccccgtctaaaagttggttttaattggttgcccacaggattgacttggcctctacttcttgttaaggaaattcatctcttgttttatcaggtgtgtgtgtgttccaagcacagcctctccaatgaacacagtcccgccgccaccaattcctccaattccagcgatgccatctctgccaccaatgccatccattcccccaattccagttcctcctccagtacctacattgcctcctgtgcctcctgtgcccccgattcccccagttccttctgtgccacccatgaccccactgccacccatgtcgggcatgccgcccttgaatccgccacctgtggcacctctacctgctggaatgaatggctctggagcacctatgaatttgaacaataatctgaatcctatgtttcttggtccgttgaatcctgttaaccctatccagatgaactctcagagcagtgtgaagccactccccatcaaccctgatgatctgtatgtcagtgtgcatggaatgcccttttctgcaatggaaaatgatgtcagagatttttttcatgggctccgtgttgatgcagtgcatttgttgaaagatcatgtaggtcgaaataatgggaatggattggttaagtttctctcccctcaagatacatttgaagctttgaaacgaaacagaatgctgatgattcaacgctatgtggaagttagccctgccacagaaagacagtgggtagctgctggaggccatatcacttttaagcaaaatatgggaccttctggacaaactcatccccctcctcagacacttcccaggtcaaaatcgcccagtgggcagaaaagatcaaggtcaagatcaccacatgaggctggtttttgtgtttacttgaaagggctaccatttgaagcagaaaacaaacatgtcattgatttttttaaaaagctggatattgtggaagatagtatttatatagcttatggacccaatgggaaagcaactggcgaaggctttgtagagttcagaaatgaggctgactataaggctgctctgtgtcgtcataaacagtacatgggcaatcgctttattcaagttcatccaattactaagaaaggtatgctagaaaagatagatatgattcgaaaaagactgcagaacttcagctatgaccagagggaaatgatactaaatccagagggggatgtcaactctgccaaagtctgtgcccacataacaaatattccattcagcattacaaagatggatgttcttcagttcctagaaggaatcccagtggatgaaaatgctgtacatgttcttgttgataacaatgggcaaggtctaggacaggcattggttcagtttaaaaatgaagatgatgcacgtaagtctgaacgcttacaccgtaaaaaacttaatgggagagaagcttttgttcatgtagttaccctagaagatatgagagagattgagaaaaatccccctgcccaaggaaaaaagggattaaagatgcctgtgccaggtaatcctgcagttccaggaatgcccaatgcgggactgcccggtgtgggactgcccagtgcaggacttcccggtgcaggcctgcccagcacaggactgcctggttcagcaataaccagtgcaggactgcctggtgcgggaatgcccagtgcaggaatacctagtgcaggaggtgaagagcatgccttcctgactgtaggatcaaaggaagccaataatgggcctccatttaactttcctggtaattttggtggatcaaatgcctttgggccaccaatccctcctccaggattaggaggcggggcctttggtgatgctaggcctggtatgccttcagttggaaacagtggtttgcctggtctaggactggatgttccgggttttggaggtggaccaaacaatttaagtgggccatcgggatttggagggggccctcagaattttggaaatggccctggtagcttaggcggtcccccggggtttggaagtggccctcctggtcttggaagtgcccctgggcatttgggtgggccaccagcttttgggcctggccccggccccggccccggccctggcccaatccatattggtggtccccctggctttgcatctagttctggaaaaccaggaccgacagtaattaaagtgcaaaacatgccctttactgtgtctattgatgagattttagatttcttttatggctatcaagtaatcccaggctcagtgtgtttaaaatacaatgaaaaaggtatgcccacaggtgaagccatggtggcctttgagtctcgggatgaagccacagctgctgtcattgacttaaatgacaggcctataggttcaagaaaagtaaaacttgtattagggtagccattcacatcattttttatagggtagatcttcatattgctgtgattaatgcatccagattgttttcctagtatttccaggttagaacctgtggattgtttcaattgcatatagcttggtttccataacatagagcattggttgactgtttacagaagactcactcaccaggataaacattgctgtatgttacagtaaagctatctggagagaacacataaatgattttggcataccattagagaaaccatttgtaaaactcaaatgaccacataaagcttatcaaggagtctagattggttttgttttataccatatgggatgaagaaaatagaaatgtcagtagaactcattgagggtgctcttgccagctgctgaaaatagaagttggctactctcagaatttggtttaaagctggacagatttgctttgttatagggtaaagctttgtctaaagtcctcattttcttttaaaattgaataaaatttctgtatacagattc

SEQ ID NO: 9808 - protein, 751 aa, Homo sapiens; identical to SEQ ID NO: 9694

SEQ ID NO: 9809 - DNA, 2978 bp, Homo sapiens
gtgaagcggcgaaggaggtggtggctgcgttgggctccgggaagccgttcgggctggggctgtcggccgcggggcggaggcactcgcgcggggggtaattcggggtctgggttctggtgccgcgcagctttccccgcgtaggaacagctcctccaaatatgggggcttcctttgggagcccaacgtttagctcaactgttccaagcacagcctctccaatgaacacagtcccgccgccaccaattcctccaattccagcgatgccatctctgccaccaatgccatccattcccccaattccagttcctcctccagtacctacattgcctcctgtgcctcctgtgcccccgattcccccagttccttctgtgccacccatgaccccactgccacccatgtcgggcatgccgcccttgaatccgccacctgtggcacctctacctgctggaatgaatggctctggagcacctatgaatttgaacaataatctgaatcctatgtttcttggtccgttgaatcctgttaaccctatccagatgaactctcagagcagtgtgaagccactccccatcaaccctgatgatctgtatgtcagtgtgcatggaatgcccttttctgcaatggaaaatgatgtcagagatttttttcatgggctccgtgttgatgcagtgcatttgttgaaagatcatgtaggtcgaaataatgggaatggattggttaagtttctctcccctcaagatacatttgaagctttgaaacgaaacagaatgctgatgattcaacgctatgtggaagttagccctgccacagaaagacagtgggtagctgctggaggccatatcacttttaagcaaaatatgggaccttctggacaaactcatccccctcctcagacacttcccaggtcaaaatcgcccagtgggcagaaaagatcaaggtcaagatcaccacatgaggctggtttttgtgtttacttgaaagggctaccatttgaagcagaaaacaaacatgtcattgatttttttaaaaagctggatattgtggaagatagtatttatatagcttatggacccaatgggaaagcaactggcgaaggctttgtagagttcagaaatgaggctgactataaggctgctctgtgtcgtcataaacagtacatgggcaatcgctttattcaagttcatccaattactaagaaaggtatgctagaaaagatagatatgattcgaaaaagactgcagaacttcagctatgaccagagggaaatgatactaaatccagagggggatgtcaactctgccaaagtctgtgcccacataacaaatattccattcagcattacaaagatggatgttcttcagttcctagaaggaatcccagtggatgaaaatgctgtacatgttcttgttgataacaatgggcaaggtctaggacaggcattggttcagtttaaaaatgaagatgatgcacgtaagtctgaacgcttacaccgtaaaaaacttaatgggagagaagcttttgttcatgtagttaccctagaagatatgagagagattgagaaaaatccccctgcccaaggaaaaaagggattaaagatgcctgtgccaggtaatcctgcagttccaggaatgcccaatgcgggactgcccggtgtgggactgcccagtgcaggacttcccggtgcaggcctgcccagcacaggactgcctggttcagcaataaccagtgcaggactgcctggtgcgggaatgcccagtgcaggaatacctagtgcaggaggtgaagagcatgccttcctgactgtaggatcaaaggaagccaataatgggcctccatttaactttcctggtaattttggtggatcaaatgcctttgggccaccaatccctcctccaggattaggaggcggggcctttggtgatgctaggcctggtatgccttcagttggaaacagtggtttgcctggtctaggactggatgttccgggttttggaggtggaccaaacaatttaagtgggccatcgggatttggagggggccctcagaattttggaaatggccctggtagcttaggcggtcccccggggtttggaagtggccctcctggtcttggaagtgcccctgggcatttgggtgggccaccagcttttgggcctggccccggccccggccccggccctggcccaatccatattggtggtccccctggctttgcatctagttctggaaaaccaggaccgacagtaattaaagtgcaaaacatgccctttactgtgtctattgatgagattttagatttcttttatggctatcaagtaatcccaggctcagtgtgtttaaaatacaatgaaaaaggtatgcccacaggtgaagccatggtggcctttgagtctcgggatgaagccacagctgctgtcattgacttaaatgacaggcctataggttcaagaaaagtaaaacttgtattagggtagccattcacatcattttttatagggtagatcttcatattgctgtgattaatgcatccagattgttttcctagtatttccaggttagaacctgtggattgtttcaattgcatatagcttggtttccataacatagagcattggttgactgtttacagaagactcactcaccaggataaacattgctgtatgttacagtaaagctatctggagagaacacataaatgattttggcataccattagagaaaccatttgtaaaactcaaatgaccacataaagcttatcaaggagtctagattggttttgttttataccatatgggatgaagaaaatagaaatgtcagtagaactcattgagggtgctcttgccagctgctgaaaatagaagttggctactctcagaatttggtttaaagctggacagatttgctttgttatagggtaaagctttgtctaaagtcctcattttcttttaaaattgaataaaatttctgtatacagattc

SEQ ID NO: 9810 - protein, 771 aa, Homo sapiens; identical to SEQ ID NO: 9686

SEQ ID NO: 9811 - DNA, 3087 bp, Homo sapiens
gtgaagcggcgaaggaggtggtggctgcgttgggctccgggaagccgttcgggctggggctgtcggccgcggggcggaggcactcgcgcggggggtaattcggggtctgggttctggtgccgcgcagctttccccgtctaaaagttggttttaattggttgcccacaggattgacttggcctctacttcttgttaaggaaattcatctcttgttttatcaggtgtgtgtggtttcagcgcaccagcgtaggaacagctcctccaaatatgggggcttcctttgggagcccaacgtttagctcaactgttccaagcacagcctctccaatgaacacagtcccgccgccaccaattcctccaattccagcgatgccatctctgccaccaatgccatccattcccccaattccagttcctcctccagtacctacattgcctcctgtgcctcctgtgcccccgattcccccagttccttctgtgccacccatgaccccactgccacccatgtcgggcatgccgcccttgaatccgccacctgtggcacctctacctgctggaatgaatggctctggagcacctatgaatttgaacaataatctgaatcctatgtttcttggtccgttgaatcctgttaaccctatccagatgaactctcagagcagtgtgaagccactccccatcaaccctgatgatctgtatgtcagtgtgcatggaatgcccttttctgcaatggaaaatgatgtcagagatttttttcatgggctccgtgttgatgcagtgcatttgttgaaagatcatgtaggtcgaaataatgggaatggattggttaagtttctctcccctcaagatacatttgaagctttgaaacgaaacagaatgctgatgattcaacgctatgtggaagttagccctgccacagaaagacagtgggtagctgctggaggccatatcacttttaagcaaaatatgggaccttctggacaaactcatccccctcctcagacacttcccaggtcaaaatcgcccagtgggcagaaaagatcaaggtcaagatcaccacatgaggctggtttttgtgtttacttgaaagggctaccatttgaagcagaaaacaaacatgtcattgatttttttaaaaagctggatattgtggaagatagtatttatatagcttatggacccaatgggaaagcaactggcgaaggctttgtagagttcagaaatgaggctgactataaggctgctctgtgtcgtcataaacagtacatgggcaatcgctttattcaagttcatccaattactaagaaaggtatgctagaaaagatagatatgattcgaaaaagactgcagaacttcagctatgaccagagggaaatgatactaaatccagagggggatgtcaactctgccaaagtctgtgcccacataacaaatattccattcagcattacaaagatggatgttcttcagttcctagaaggaatcccagtggatgaaaatgctgtacatgttcttgttgataacaatgggcaaggtctaggacaggcattggttcagtttaaaaatgaagatgatgcacgtaagtctgaacgcttacaccgtaaaaaacttaatgggagagaagcttttgttcatgtagttaccctagaagatatgagagagattgagaaaaatccccctgcccaaggaaaaaagggattaaagatgcctgtgccaggtaatcctgcagttccaggaatgcccaatgcgggactgcccggtgtgggactgcccagtgcaggacttcccggtgcaggcctgcccagcacaggactgcctggttcagcaataaccagtgcaggactgcctggtgcgggaatgcccagtgcaggaatacctagtgcaggaggtgaagagcatgccttcctgactgtaggatcaaaggaagccaataatgggcctccatttaactttcctggtaattttggtggatcaaatgcctttgggccaccaatccctcctccaggattaggaggcggggcctttggtgatgctaggcctggtatgccttcagttggaaacagtggtttgcctggtctaggactggatgttccgggttttggaggtggaccaaacaatttaagtgggccatcgggatttggagggggccctcagaattttggaaatggccctggtagcttaggcggtcccccggggtttggaagtggccctcctggtcttggaagtgcccctgggcatttgggtgggccaccagcttttgggcctggccccggccccggccccggccctggcccaatccatattggtggtccccctggctttgcatctagttctggaaaaccaggaccgacagtaattaaagtgcaaaacatgccctttactgtgtctattgatgagattttagatttcttttatggctatcaagtaatcccaggctcagtgtgtttaaaatacaatgaaaaaggtatgcccacaggtgaagccatggtggcctttgagtctcgggatgaagccacagctgctgtcattgacttaaatgacaggcctataggttcaagaaaagtaaaacttgtattagggtagccattcacatcattttttatagggtagatcttcatattgctgtgattaatgcatccagattgttttcctagtatttccaggttagaacctgtggattgtttcaattgcatatagcttggtttccataacatagagcattggttgactgtttacagaagactcactcaccaggataaacattgctgtatgttacagtaaagctatctggagagaacacataaatgattttggcataccattagagaaaccatttgtaaaactcaaatgaccacataaagcttatcaaggagtctagattggttttgttttataccatatgggatgaagaaaatagaaatgtcagtagaactcattgagggtgctcttgccagctgctgaaaatagaagttggctactctcagaatttggtttaaagctggacagatttgctttgttatagggtaaagctttgtctaaagtcctcattttcttttaaaattgaataaaatttctgtatacagattc

SEQ ID NO: 9812 - protein, 771 aa, Homo sapiens; identical to SEQ ID NO: 9686

SEQ ID NO: 9813 - DNA, 2732 bp, Homo sapiens
ggccattttgtgaagcggcgaaggaggtggtggctgcgttgggctccgggaagccgttcgggctggggctgtcggccgcggggcggaggcactcgcgcggggggtaattcggggtctgggttctggtgccgcgcagctttccccgtctaaaagttggttttaattggttgcccacaggattgacttggcctctacctgctggaatgaatggctctggagcacctatgaatttgaacaataatctgaatcctatgtttcttggtccgttgaatcctgttaaccctatccagatgaactctcagagcagtgtgaagccactccccatcaaccctgatgatctgtatgtcagtgtgcatggaatgcccttttctgcaatggaaaatgatgtcagagatttttttcatgggctccgtgttgatgcagtgcatttgttgaaagatcatgtaggtcgaaataatgggaatggattggttaagtttctctcccctcaagatacatttgaagctttgaaacgaaacagaatgctgatgattcaacgctatgtggaagttagccctgccacagaaagacagtgggtagctgctggaggccatatcacttttaagcaaaatatgggaccttctggacaaactcatccccctcctcagacacttcccaggtcaaaatcgcccagtgggcagaaaagatcaaggtcaagatcaccacatgaggctggtttttgtgtttacttgaaagggctaccatttgaagcagaaaacaaacatgtcattgatttttttaaaaagctggatattgtggaagatagtatttatatagcttatggacccaatgggaaagcaactggcgaaggctttgtagagttcagaaatgaggctgactataaggctgctctgtgtcgtcataaacagtacatgggcaatcgctttattcaagttcatccaattactaagaaaggtatgctagaaaagatagatatgattcgaaaaagactgcagaacttcagctatgaccagagggaaatgatactaaatccagagggggatgtcaactctgccaaagtctgtgcccacataacaaatattccattcagcattacaaagatggatgttcttcagttcctagaaggaatcccagtggatgaaaatgctgtacatgttcttgttgataacaatgggcaaggtctaggacaggcattggttcagtttaaaaatgaagatgatgcacgtaagtctgaacgcttacaccgtaaaaaacttaatgggagagaagcttttgttcatgtagttaccctagaagatatgagagagattgagaaaaatccccctgcccaaggaaaaaagggattaaagatgcctgtgccaggtaatcctgcagttccaggaatgcccaatgcgggactgcccggtgtgggactgcccagtgcaggacttcccggtgcaggcctgcccagcacaggactgcctggttcagcaataaccagtgcaggactgcctggtgcgggaatgcccagtgcaggaatacctagtgcaggaggtgaagagcatgccttcctgactgtaggatcaaaggaagccaataatgggcctccatttaactttcctggtaattttggtggatcaaatgcctttgggccaccaatccctcctccaggattaggaggcggggcctttggtgatgctaggcctggtatgccttcagttggaaacagtggtttgcctggtctaggactggatgttccgggttttggaggtggaccaaacaatttaagtgggccatcgggatttggagggggccctcagaattttggaaatggccctggtagcttaggcggtcccccggggtttggaagtggccctcctggtcttggaagtgcccctgggcatttgggtgggccaccagcttttgggcctggccccggccccggccccggccctggcccaatccatattggtggtccccctggctttgcatctagttctggaaaaccaggaccgacagtaattaaagtgcaaaacatgccctttactgtgtctattgatgagattttagatttcttttatggctatcaagtaatcccaggctcagtgtgtttaaaatacaatgaaaaaggtatgcccacaggtgaagccatggtggcctttgagtctcgggatgaagccacagctgctgtcattgacttaaatgacaggcctataggttcaagaaaagtaaaacttgtattagggtagccattcacatcattttttatagggtagatcttcatattgctgtgattaatgcatccagattgttttcctagtatttccaggttagaacctgtggattgtttcaattgcatatagcttggtttccataacatagagcattggttgactgtttacagaagactcactcaccaggataaacattgctgtatgttacagtaaagctatctggagagaacacataaatgattttggcataccattagagaaaccatttgtaaaactcaaatgaccacataaagcttatcaaggagtctagattggttttgttttataccatatgggatgaagaaaatagaaatgtcagtagaactcattgagggtgctcttgccagctgctgaaaatagaagttggctactctcagaatttggtttaaagctggacagatttgctttgttatagggtaaagctttgtctaaagtcctcattttcttttaaaattgaataaaatttctgtatacagattc

SEQ ID NO: 9814 - protein, 674 aa, Homo sapiens; identical to SEQ ID NO: 9698

SEQ ID NO: 9815 - DNA, 3470 bp, Homo sapiens
ggccattttgtgaagcggcgaaggaggtggtggctgcgttgggctccgggaagccgttcgggctggggctgtcggccgcggggcggaggcactcgcgcggggggtaattcggggtctgggttctggtgccgcgcagctttccccggtgtgtgtggtttcagcgcagcatggctgtggtcatccgtttgcaaggtctcccaattgtggcggggaccatggacattcgccacttcttctctggattgaccattcctgatgggggcgtgcatattgtagggggtgaactgggtgaggctttcatcgtttttgccactgatgaagatgcaaggcttggtatgatgcgcacaggtggtacaattaaagggtcaaaagtaacactattgttgagtagtaagacggaaatgcagaatatgattgaactgagtcgtaggcgttttgaaactgccaacttagatataccaccagcaaatgccagtagatcaggaccaccacctagctcaggaatgagtagcagggtaaacttgcccacaacagtatccaactttaataatccatcacccagtgtagttactgccaccacttctgttcatgaaagcaacaaaaacatacagacattttccacagccagcgtaggaacagctcctccaaatatgggggcttcctttgggagcccaacgtttagctcaactgttccaagcacagcctctccaatgaacacagtcccgccgccaccaattcctccaattccagcgatgccatctctgccaccaatgccatccattcccccaattccagttcctcctccagtacctacattgcctcctgtgcctcctgtgcccccgattcccccagttccttctgtgccacccatgaccccactgccacccatgtcgggcatgccgcccttgaatccgccacctgtggcacctctacctgctggaatgaatggctctggagcacctatgaatttgaacaataatctgaatcctatgtttcttggtccgttgaatcctgttaaccctatccagatgaactctcagagcagtgtgaagccactccccatcaaccctgatgatctgtatgtcagtgtgcatggaatgcccttttctgcaatggaaaatgatgtcagagatttttttcatgggctccgtgttgatgcagtgcatttgttgaaagatcatgtaggtcgaaataatgggaatggattggttaagtttctctcccctcaagatacatttgaagctttgaaacgaaacagaatgctgatgattcaacgctatgtggaagttagccctgccacagaaagacagtgggtagctgctggaggccatatcacttttaagcaaaatatgggaccttctggacaaactcatccccctcctcagacacttcccaggtcaaaatcgcccagtgggcagaaaagatcaaggtcaagatcaccacatgaggctggtttttgtgtttacttgaaagggctaccatttgaagcagaaaacaaacatgtcattgatttttttaaaaagctggatattgtggaagatagtatttatatagcttatggacccaatgggaaagcaactggcgaaggctttgtagagttcagaaatgaggctgactataaggctgctctgtgtcgtcataaacagtacatgggcaatcgctttattcaagttcatccaattactaagaaaggtatgctagaaaagatagatatgattcgaaaaagactgcagaacttcagctatgaccagagggaaatgatactaaatccagagggggatgtcaactctgccaaagtctgtgcccacataacaaatattccattcagcattacaaagatggatgttcttcagttcctagaaggaatcccagtggatgaaaatgctgtacatgttcttgttgataacaatgggcaaggtctaggacaggcattggttcagtttaaaaatgaagatgatgcacgtaagtctgaacgcttacaccgtaaaaaacttaatgggagagaagcttttgttcatgtagttaccctagaagatatgagagagattgagaaaaatccccctgcccaaggaaaaaagggattaaagatgcctgtgccaggtaatcctgcagttccaggaatgcccaatgcgggactgcccggtgtgggactgcccagtgcaggacttcccggtgcaggcctgcccagcacaggactgcctggttcagcaataaccagtgcaggactgcctggtgcgggaatgcccagtgcaggaatacctagtgcaggaggtgaagagcatgccttcctgactgtaggatcaaaggaagccaataatgggcctccatttaactttcctggtaattttggtggatcaaatgcctttgggccaccaatccctcctccaggattaggaggcggggcctttggtgatgctaggcctggtatgccttcagttggaaacagtggtttgcctggtctaggactggatgttccgggttttggaggtggaccaaacaatttaagtgggccatcgggatttggagggggccctcagaattttggaaatggccctggtagcttaggcggtcccccggggtttggaagtggccctcctggtcttggaagtgcccctgggcatttgggtgggccaccagcttttgggcctggccccggccccggccccggccctggcccaatccatattggtggtccccctggctttgcatctagttctggaaaaccaggaccgacagtaattaaagtgcaaaacatgccctttactgtgtctattgatgagattttagatttcttttatggctatcaagtaatcccaggctcagtgtgtttaaaatacaatgaaaaaggtatgcccacaggtgaagccatggtggcctttgagtctcgggatgaagccacagctgctgtcattgacttaaatgacaggcctataggttcaagaaaagtaaaacttgtattagggtagccattcacatcattttttatagggtagatcttcatattgctgtgattaatgcatccagattgttttcctagtatttccaggttagaacctgtggattgtttcaattgcatatagcttggtttccataacatagagcattggttgactgtttacagaagactcactcaccaggataaacattgctgtatgttacagtaaagctatctggagagaacacataaatgattttggcataccattagagaaaccatttgtaaaactcaaatgaccacataaagcttatcaaggagtctagattggttttgttttataccatatgggatgaagaaaatagaaatgtcagtagaactcattgagggtgctcttgccagctgctgaaaatagaagttggctactctcagaatttggtttaaagctggacagatttgctttgttatagggtaaagctttgtctaaagtcctcattttcttttaaaattgaataaaatttctgtatacagattc

SEQ ID NO: 9816 - protein, 932 aa, Homo sapiens; identical to SEQ ID NO: 1239

SEQ ID NO: 9817 - DNA, 2453 bp, Homo sapiens
ggaacgcggagccgctgagcgggccgacggccattttgtgaagcggcgaaggaggtggtggctgcgttgggctccgggaagccgttcgggctggggctgtcggccgcggggcggaggcactcgcgcgggggtctaaaagttggttttaattggttgcccacaggattgacttggcctctacttcttgttaaggaaattcatctcttgttttatcaggtgtgtgtggtttcagcgcagcatggctgtggtcatccgtttgcaaggtctcccaattgtggcggggaccatggacattcgccacttcttctctggattgaccattcctgatgggggcgtgcatattgtagggggtgaactgggtgaggctttcatcgtttttgccactgatgaagatgcaaggcttggtatgatgcgcacaggtggtacaattaaagggtcaaaagtaacactattgttgagtagtaagacggaaatgcagaatatgattgaactgattttttaaaaagctggatattgtggaagatagtatttatatagcttatggacccaatgggaaagcaactggcgaaggctttgtagagttcagaaatgaggctgactataaggctgctctgtgtcgtcataaacagtacatgggcaatcgctttattcaagttcatccaattactaagaaaggtatgctagaaaagatagatatgattcgaaaaagactgcagaacttcagctatgaccagagggaaatgatactaaatccagagggggatgtcaactctgccaaagtctgtgcccacataacaaatattccattcagcattacaaagatggatgttcttcagttcctagaaggaatcccagtggatgaaaatgctgtacatgttcttgttgataacaatgggcaaggtctaggacaggcattggttcagtttaaaaatgaagatgatgcacgtaagtctgaacgcttacaccgtaaaaaacttaatgggagagaagcttttgttcatgtagttaccctagaagatatgagagagattgagaaaaatccccctgcccaaggaaaaaagggattaaagatgcctgtgccaggtaatcctgcagttccaggaatgcccaatgcgggactgcccggtgtgggactgcccagtgcaggacttcccggtgcaggcctgcccagcacaggactgcctggttcagcaataaccagtgcaggactgcctggtgcgggaatgcccagtgcaggaatacctagtgcaggaggtgaagagcatgccttcctgactgtaggatcaaaggaagccaataatgggcctccatttaactttcctggtaattttggtggatcaaatgcctttgggccaccaatccctcctccaggattaggaggcggggcctttggtgatgctaggcctggtatgccttcagttggaaacagtggtttgcctggtctaggactggatgttccgggttttggaggtggaccaaacaatttaagtgggccatcgggatttggagggggccctcagaattttggaaatggccctggtagcttaggcggtcccccggggtttggaagtggccctcctggtcttggaagtgcccctgggcatttgggtgggccaccagcttttgggcctggccccggccccggccccggccctggcccaatccatattggtggtccccctggctttgcatctagttctggaaaaccaggaccgacagtaattaaagtgcaaaacatgccctttactgtgtctattgatgagattttagatttcttttatggctatcaagtaatcccaggctcagtgtgtttaaaatacaatgaaaaaggtatgcccacaggtgaagccatggtggcctttgagtctcgggatgaagccacagctgctgtcattgacttaaatgacaggcctataggttcaagaaaagtaaaacttgtattagggtagccattcacatcattttttatagggtagatcttcatattgctgtgattaatgcatccagattgttttcctagtatttccaggttagaacctgtggattgtttcaattgcatatagcttggtttccataacatagagcattggttgactgtttacagaagactcactcaccaggataaacattgctgtatgttacagtaaagctatctggagagaacacataaatgattttggcataccattagagaaaccatttgtaaaactcaaatgaccacataaagcttatcaaggagtctagattggttttgttttataccatatgggatgaagaaaatagaaatgtcagtagaactcattgagggtgctcttgccagctgctgaaaatagaagttggctactctcagaatttggtttaaagctggacagatttgctttgttatagggtaaagctttgtctaaagtcctcattttcttttaaaattgaataaaatttctgtatacagattc

SEQ ID NO: 9818 - protein, 87 aa, Homo sapiens; identical to SEQ ID NO: 9700

SEQ ID NO: 9819 - DNA, 3542 bp, Homo sapiens
tggaacgcggagccgctgagcgggccgacggccattttgtgaagcggcgaaggaggtggtggctgcgttgggctccgggaagccgttcgggctggggctgtcggccgcggggcggaggcactcgcgcgggggtctaaaagttggttttaattggttgcccacaggattgacttggcctctacttcttgttaaggaaattcatctcttgttttatcaggtgtgtgtggtttcagcgcagcatggctgtggtcatccgtttgcaaggtctcccaattgtggcggggaccatggacattcgccacttcttctctggattgaccattcctgatgggggcgtgcatattgtagggggtgaactgggtgaggctttcatcgtttttgccactgatgaagatgcaaggcttggtatgatgcgcacaggtggtacaattaaagggtcaaaagtaacactattgttgagtagtaagacggaaatgcagaatatgattgaactgagtcgtaggcgttttgaaactgccaacttagatataccaccagcaaatgccagtagatcaggaccaccacctagctcaggaatgagtagcagggtaaacttgcccacaacagtatccaactttaataatccatcacccagtgtagttactgccaccacttctgttcatgaaagcaacaaaaacatacagacattttccacagccagcgtaggaacagctcctccaaatatgggggcttcctttgggagcccaacgtttagctcaactgttccaagcacagcctctccaatgaacacagtcccgccgccaccaattcctccaattccagcgatgccatctctgccaccaatgccatccattcccccaattccagttcctcctccagtacctacattgcctcctgtgcctcctgtgcccccgattcccccagttccttctgtgccacccatgaccccactgccacccatgtcgggcatgccgcccttgaatccgccacctgtggcacctctacctgctggaatgaatggctctggagcacctatgaatttgaacaataatctgaatcctatgtttcttggtccgttgaatcctgttaaccctatccagatgaactctcagagcagtgtgaagccactccccatcaaccctgatgatctgtatgtcagtgtgcatggaatgcccttttctgcaatggaaaatgatgtcagagatttttttcatgggctccgtgttgatgcagtgcatttgttgaaagatcatgtaggtcgaaataatgggaatggattggttaagtttctctcccctcaagatacatttgaagctttgaaacgaaacagaatgctgatgattcaacgctatgtggaagttagccctgccacagaaagacagtgggtagctgctggaggccatatcacttttaagcaaaatatgggaccttctggacaaactcatccccctcctcagacacttcccaggtcaaaatcgcccagtgggcagaaaagatcaaggtcaagatcaccacatgaggctggtttttgtgtttacttgaaagggctaccatttgaagcagaaaacaaacatgtcattgatttttttaaaaagctggatattgtggaagatagtatttatatagcttatggacccaatgggaaagcaactggcgaaggctttgtagagttcagaaatgaggctgactataaggctgctctgtgtcgtcataaacagtacatgggcaatcgctttattcaagttcatccaattactaagaaaggtatgctagaaaagatagatatgattcgaaaaagactgcagaacttcagctatgaccagagggaaatgatactaaatccagagggggatgtcaactctgccaaagtctgtgcccacataacaaatattccattcagcattacaaagatggatgttcttcagttcctagaaggaatcccagtggatgaaaatgctgtacatgttcttgttgataacaatgggcaaggtctaggacaggcattggttcagtttaaaaatgaagatgatgcacgtaagtctgaacgcttacaccgtaaaaaacttaatgggagagaagcttttgttcatgtagttaccctagaagatatgagagagattgagaaaaatccccctgcccaaggaaaaaagggattaaagatgcctgtgccaggtaatcctgcagttccaggaatgcccaatgcgggactgcccggtgtgggactgcccagtgcaggacttcccggtgcaggcctgcccagcacaggactgcctggttcagcaataaccagtgcaggactgcctggtgcgggaatgcccagtgcaggaatacctagtgcaggaggtgaagagcatgccttcctgactgtaggatcaaaggaagccaataatgggcctccatttaactttcctggtaattttggtggatcaaatgcctttgggccaccaatccctcctccaggattaggaggcggggcctttggtgatgctaggcctggtatgccttcagttggaaacagtggtttgcctggtctaggactggatgttccgggttttggaggtggaccaaacaatttaagtgggccatcgggatttggagggggccctcagaattttggaaatggccctggtagcttaggcggtcccccggggtttggaagtggccctcctggtcttggaagtgcccctgggcatttgggtgggccaccagcttttgggcctggccccggccccggccccggccctggcccaatccatattggtggtccccctggctttgcatctagttctggaaaaccaggaccgacagtaattaaagtgcaaaacatgccctttactgtgtctattgatgagattttagatttcttttatggctatcaagtaatcccaggctcagtgtgtttaaaatacaatgaaaaaggtatgcccacaggtgaagccatggtggcctttgagtctcgggatgaagccacagctgctgtcattgacttaaatgacaggcctataggttcaagaaaagtaaaacttgtattagggtagccattcacatcattttttatagggtagatcttcatattgctgtgattaatgcatccagattgttttcctagtatttccaggttagaacctgtggattgtttcaattgcatatagcttggtttccataacatagagcattggttgactgtttacagaagactcactcaccaggataaacattgctgtatgttacagtaaagctatctggagagaacacataaatgattttggcataccattagagaaaccatttgtaaaactcaaatgaccacataaagcttatcaaggagtctagattggttttgttttataccatatgggatgaagaaaatagaaatgtcagtagaactcattgagggtgctcttgccagctgctgaaaatagaagttggctactctcagaatttggtttaaagctggacagatttgctttgttatagggtaaagctttgtctaaagtcctcattttcttttaaaattgaataaaatttctgtatacagattc

SEQ ID NO: 9820 - protein, 932 aa, Homo sapiens; identical to SEQ ID NO: 1239

SEQ ID NO: 9821 - DNA, 3588 bp, Homo sapiens
cttctggaacgcggagccgctgagcgggccgacggccattttgtgaagcggcgaaggaggtggtggctgcgttgggctccgggaagccgttcgggctggggctgtcggccgcggggcggaggcactcgcgcggggggtaattcggggtctgggttctggtgccgcgcagctttccccgtctaaaagttggttttaattggttgcccacaggattgacttggcctctacttcttgttaaggaaattcatctcttgttttatcaggtgtgtgtggtttcagcgcagcatggctgtggtcatccgtttgcaaggtctcccaattgtggcggggaccatggacattcgccacttcttctctggattgaccattcctgatgggggcgtgcatattgtagggggtgaactgggtgaggctttcatcgtttttgccactgatgaagatgcaaggcttggtatgatgcgcacaggtggtacaattaaagggtcaaaagtaacactattgttgagtagtaagacggaaatgcagaatatgattgaactgagtcgtaggcgttttgaaactgccaacttagatataccaccagcaaatgccagtagatcaggaccaccacctagctcaggaatgagtagcagggtaaacttgcccacaacagtatccaactttaataatccatcacccagtgtagttactgccaccacttctgttcatgaaagcaacaaaaacatacagacattttccacagccagcgtaggaacagctcctccaaatatgggggcttcctttgggagcccaacgtttagctcaactgttccaagcacagcctctccaatgaacacagtcccgccgccaccaattcctccaattccagcgatgccatctctgccaccaatgccatccattcccccaattccagttcctcctccagtacctacattgcctcctgtgcctcctgtgcccccgattcccccagttccttctgtgccacccatgaccccactgccacccatgtcgggcatgccgcccttgaatccgccacctgtggcacctctacctgctggaatgaatggctctggagcacctatgaatttgaacaataatctgaatcctatgtttcttggtccgttgaatcctgttaaccctatccagatgaactctcagagcagtgtgaagccactccccatcaaccctgatgatctgtatgtcagtgtgcatggaatgcccttttctgcaatggaaaatgatgtcagagatttttttcatgggctccgtgttgatgcagtgcatttgttgaaagatcatgtaggtcgaaataatgggaatggattggttaagtttctctcccctcaagatacatttgaagctttgaaacgaaacagaatgctgatgattcaacgctatgtggaagttagccctgccacagaaagacagtgggtagctgctggaggccatatcacttttaagcaaaatatgggaccttctggacaaactcatccccctcctcagacacttcccaggtcaaaatcgcccagtgggcagaaaagatcaaggtcaagatcaccacatgaggctggtttttgtgtttacttgaaagggctaccatttgaagcagaaaacaaacatgtcattgatttttttaaaaagctggatattgtggaagatagtatttatatagcttatggacccaatgggaaagcaactggcgaaggctttgtagagttcagaaatgaggctgactataaggctgctctgtgtcgtcataaacagtacatgggcaatcgctttattcaagttcatccaattactaagaaaggtatgctagaaaagatagatatgattcgaaaaagactgcagaacttcagctatgaccagagggaaatgatactaaatccagagggggatgtcaactctgccaaagtctgtgcccacataacaaatattccattcagcattacaaagatggatgttcttcagttcctagaaggaatcccagtggatgaaaatgctgtacatgttcttgttgataacaatgggcaaggtctaggacaggcattggttcagtttaaaaatgaagatgatgcacgtaagtctgaacgcttacaccgtaaaaaacttaatgggagagaagcttttgttcatgtagttaccctagaagatatgagagagattgagaaaaatccccctgcccaaggaaaaaagggattaaagatgcctgtgccaggtaatcctgcagttccaggaatgcccaatgcgggactgcccggtgtgggactgcccagtgcaggacttcccggtgcaggcctgcccagcacaggactgcctggttcagcaataaccagtgcaggactgcctggtgcgggaatgcccagtgcaggaatacctagtgcaggaggtgaagagcatgccttcctgactgtaggatcaaaggaagccaataatgggcctccatttaactttcctggtaattttggtggatcaaatgcctttgggccaccaatccctcctccaggattaggaggcggggcctttggtgatgctaggcctggtatgccttcagttggaaacagtggtttgcctggtctaggactggatgttccgggttttggaggtggaccaaacaatttaagtgggccatcgggatttggagggggccctcagaattttggaaatggccctggtagcttaggcggtcccccggggtttggaagtggccctcctggtcttggaagtgcccctgggcatttgggtgggccaccagcttttgggcctggccccggccccggccccggccctggcccaatccatattggtggtccccctggctttgcatctagttctggaaaaccaggaccgacagtaattaaagtgcaaaacatgccctttactgtgtctattgatgagattttagatttcttttatggctatcaagtaatcccaggctcagtgtgtttaaaatacaatgaaaaaggtatgcccacaggtgaagccatggtggcctttgagtctcgggatgaagccacagctgctgtcattgacttaaatgacaggcctataggttcaagaaaagtaaaacttgtattagggtagccattcacatcattttttatagggtagatcttcatattgctgtgattaatgcatccagattgttttcctagtatttccaggttagaacctgtggattgtttcaattgcatatagcttggtttccataacatagagcattggttgactgtttacagaagactcactcaccaggataaacattgctgtatgttacagtaaagctatctggagagaacacataaatgattttggcataccattagagaaaccatttgtaaaactcaaatgaccacataaagcttatcaaggagtctagattggttttgttttataccatatgggatgaagaaaatagaaatgtcagtagaactcattgagggtgctcttgccagctgctgaaaatagaagttggctactctcagaatttggtttaaagctggacagatttgctttgttatagggtaaagctttgtctaaagtcctcattttcttttaaaattgaataaaatttctgtatacagattc

SEQ ID NO: 9822 - protein, 932 aa, Homo sapiens; identical to SEQ ID NO: 1239

SEQ ID NO: 9823 - DNA, 3456 bp, Homo sapiens
aaccacgccgttcctcccccttctggaacgcggagccgctgagcgggccgacggccattttgtgaagcggcgaaggaggattgacttggcctctacttcttgttaaggaaattcatctcttgttttatcaggtgtgtgtggtttcagcgcagcatggctgtggtcatccgtttgcaaggtctcccaattgtggcggggaccatggacattcgccacttcttctctggattgaccattcctgatgggggcgtgcatattgtagggggtgaactgggtgaggctttcatcgtttttgccactgatgaagatgcaaggcttggtatgatgcgcacaggtggtacaattaaagggtcaaaagtaacactattgttgagtagtaagacggaaatgcagaatatgattgaactgagtcgtaggcgttttgaaactgccaacttagatataccaccagcaaatgccagtagatcaggaccaccacctagctcaggaatgagtagcagggtaaacttgcccacaacagtatccaactttaataatccatcacccagtgtagttactgccaccacttctgttcatgaaagcaacaaaaacatacagacattttccacagccagcgtaggaacagctcctccaaatatgggggcttcctttgggagcccaacgtttagctcaactgttccaagcacagcctctccaatgaacacagtcccgccgccaccaattcctccaattccagcgatgccatctctgccaccaatgccatccattcccccaattccagttcctcctccagtacctacattgcctcctgtgcctcctgtgcccccgattcccccagttccttctgtgccacccatgaccccactgccacccatgtcgggcatgccgcccttgaatccgccacctgtggcacctctacctgctggaatgaatggctctggagcacctatgaatttgaacaataatctgaatcctatgtttcttggtccgttgaatcctgttaaccctatccagatgaactctcagagcagtgtgaagccactccccatcaaccctgatgatctgtatgtcagtgtgcatggaatgcccttttctgcaatggaaaatgatgtcagagatttttttcatgggctccgtgttgatgcagtgcatttgttgaaagatcatgtaggtcgaaataatgggaatggattggttaagtttctctcccctcaagatacatttgaagctttgaaacgaaacagaatgctgatgattcaacgctatgtggaagttagccctgccacagaaagacagtgggtagctgctggaggccatatcacttttaagcaaaatatgggaccttctggacaaactcatccccctcctcagacacttcccaggtcaaaatcgcccagtgggcagaaaagatcaaggtcaagatcaccacatgaggctggtttttgtgtttacttgaaagggctaccatttgaagcagaaaacaaacatgtcattgatttttttaaaaagctggatattgtggaagatagtatttatatagcttatggacccaatgggaaagcaactggcgaaggctttgtagagttcagaaatgaggctgactataaggctgctctgtgtcgtcataaacagtacatgggcaatcgctttattcaagttcatccaattactaagaaaggtatgctagaaaagatagatatgattcgaaaaagactgcagaacttcagctatgaccagagggaaatgatactaaatccagagggggatgtcaactctgccaaagtctgtgcccacataacaaatattccattcagcattacaaagatggatgttcttcagttcctagaaggaatcccagtggatgaaaatgctgtacatgttcttgttgataacaatgggcaaggtctaggacaggcattggttcagtttaaaaatgaagatgatgcacgtaagtctgaacgcttacaccgtaaaaaacttaatgggagagaagcttttgttcatgtagttaccctagaagatatgagagagattgagaaaaatccccctgcccaaggaaaaaagggattaaagatgcctgtgccaggtaatcctgcagttccaggaatgcccaatgcgggactgcccggtgtgggactgcccagtgcaggacttcccggtgcaggcctgcccagcacaggactgcctggttcagcaataaccagtgcaggactgcctggtgcgggaatgcccagtgcaggaatacctagtgcaggaggtgaagagcatgccttcctgactgtaggatcaaaggaagccaataatgggcctccatttaactttcctggtaattttggtggatcaaatgcctttgggccaccaatccctcctccaggattaggaggcggggcctttggtgatgctaggcctggtatgccttcagttggaaacagtggtttgcctggtctaggactggatgttccgggttttggaggtggaccaaacaatttaagtgggccatcgggatttggagggggccctcagaattttggaaatggccctggtagcttaggcggtcccccggggtttggaagtggccctcctggtcttggaagtgcccctgggcatttgggtgggccaccagcttttgggcctggccccggccccggccccggccctggcccaatccatattggtggtccccctggctttgcatctagttctggaaaaccaggaccgacagtaattaaagtgcaaaacatgccctttactgtgtctattgatgagattttagatttcttttatggctatcaagtaatcccaggctcagtgtgtttaaaatacaatgaaaaaggtatgcccacaggtgaagccatggtggcctttgagtctcgggatgaagccacagctgctgtcattgacttaaatgacaggcctataggttcaagaaaagtaaaacttgtattagggtagccattcacatcattttttatagggtagatcttcatattgctgtgattaatgcatccagattgttttcctagtatttccaggttagaacctgtggattgtttcaattgcatatagcttggtttccataacatagagcattggttgactgtttacagaagactcactcaccaggataaacattgctgtatgttacagtaaagctatctggagagaacacataaatgattttggcataccattagagaaaccatttgtaaaactcaaatgaccacataaagcttatcaaggagtctagattggttttgttttataccatatgggatgaagaaaatagaaatgtcagtagaactcattgagggtgctcttgccagctgctgaaaatagaagttggctactctcagaatttggtttaaagctggacagatttgctttgttatagggtaaagctttgtctaaagtcctcattttcttttaaaattgaataaaatttctgtatacagattc

SEQ ID NO: 9824 - protein, 932 aa, Homo sapiens; identical to SEQ ID NO: 1239

SEQ ID NO: 9825 - DNA, 1253 bp, Homo sapiens
agaattgaagatgctccaaaggccactaagtgtttggctgcccttcaggctggtgcagatggtgcattacgtcctggggaatgcctgcacctctgcatccctggagccctcttatgtgcttagagcaattggcactgatgaggatttagcgcactcttctatcaggtttggaattggccgcttcactacagaggaggaagtggactacacagtggagaaatgcattcagcatgtgaagcgtcttcgagaaatgagccctctctgggagatggttcaggatggcattgacctcaagagcatcaagtggacccaacactagaagaatagggccctgactttgtgctggtctggcccctcctgcctcaccaacccgtgcacaaccagacaccttgttacacctagtggatgctctagattggtatagaccagttgacttcagcatcagtccacctctatgacagaaacacaagaaaactgtctttccctagcttcagttccttgggtgtggagcactccccatttcttctcgggtcttaaagtgtgtggacattttcatcccgaagccatagagacatttgctgtcatattgctgctgggcacatctgtgctcttggtgaggagagcaagaggaaccagaagaagtctctttggtcagggaccatgatgctctacatggacatttgagtcttcgtcttctgctgctgctcggctggaccagcttctttaacagcaagcataatccacttcaatgtaatattttctgtagctccaaaggctatctcttcatattgactgcagacagactgaatggacagtttcttagagggcttgtctcctttctacccttgtcctctttcctttcctttgacctaatggagctagaaatatgtctgtgactccaccagttattctaataatttgttttcttgaaaattgttaatttcaagactggagaaataaactcaccttctatttactctgtgactttatgagaggttgagggaaaagtggaagctgtacttgggaattgtggagaagaccgccactccatctgatttgcataaatgactcagtgggcttttgtatctcttcatttaagaattatttgaatgcctgccaggagccagatttgttctgggtattaggaatacactggttaacaggaccaaaaaagaccctgccctcactgagttttaaattttagtggagagatggaaaataattaaacaaataaacaatgttatagattgtga

SEQ ID NO: 9826 - protein, 102 aa, Homo sapiens
MLQRPLSVWLPFRLVQMVHYVLGNACTSASLEPSYVLRAIGTDEDLAHSSIRFGIGRFTTEEEVDYTVEKCIQHVKRLREMSPLWEMVQDGIDLKSIKWTQH

SEQ ID NO: 9827 - DNA, 2929 bp, Homo sapiens
cagcctccctagtagctgggattacaggcatgtgccaccatgcctggctaattttgtatttttagtggagaaggggtttctccatgttggtcaggctggtctcaaactcccgaactcaggtgatccacccacctcagcctcccaaagtgctggtattacaggcgtgagccactgcgcccggccaatacatctttgttttttcaagctaaagtacagacttttttttggatttcaccagttttgtaacaatgtatcttggagattttatggtgtcagttcagaacaagcttcttcttttttttttttttttttttgggagacagagtcttgctccatcactcaggctggagtgcagtggcttgatctcagctcactgcaacctctaccacctgggttcatctcatgtctcagcctcctgagtagctgggattacatgtgcctgctaccacgcttggctaatctttgtatttttagtagagagagggtttcaccatgttgaccaggctggtttctaacttctgatctcaggtgatccgcccgccttgacctcccacagttgggattataggcgtgaaccaccacacccggccccctcattcttttatacacctgcttggtatttcattgtatggacatgccataatctatttgaccattaccctgatgatggacatctaagttgttcccagtatttttgctattatgaataatactgtaatgtatgatggcatttcatatagcatagggagctactttaaaccattttgatcattactccttctggcatttatcttccagatgttaaatattttactaaatactatgcttttactgctgtttcttcttttccttaacgttttttatttagaaaaatttcatgcttacagaaaagttgaagtaatattttgatccctttggaaagaaatattttgttttatctacttttctctctttctgttttttgtaacaaattttgtttcccaggggttggtgccatctacatccgtcgccggccccgtgtgcgtgtggaggccctgcagagtggaggggggcaggagcggggtatgcggtctgggacagtgcccacacccttagtggtggggctgggggctgcgtgtgaggtggcacagcaagagatggaggtatggggagagcagttccctcccacaacttcttcccctgtgctgggtctcctatttagaggcttctcagcatgactgaggcagatctctgcagggagagagggcttaagaaaactcttccttgtcctggtgctgctggcaccttgttctgagggagacattatgggcttcaaaacccatggccttttagtagttatcagctcatttatttctggataagtaaatgaaccctgtgtccagttatcaagcgccttttgcataccaggcactatgctcagtactggagatacagtggtccccatgagtacataggatgataggtggggctgatacatagtcacttccagttataggagaagggcttctcaaactgtctttctgagctggttaatggttactgcctaatccttccttgcctgctccttagtatgaccacaagcgaatctcaaagttgtcagagcggctgatacagaatataatgaagagccttccagatgtggtgatgaatggggaccctaagcaccattatcccggctgtatcaacctctcctttgcatatgtggaaggggaaagtctgctgatggcactgaaggacgttgccttatcctcagggagtgcctgcacctctgcatccctggagccctcttatgtgcttagagcaattggcactgatgaggatttagcgcactcttctatcaggtttggaattggccgcttcactacagaggaggaagtggactacacagtggagaaatgcattcagcatgtgaagcgtcttcgagaaatgagccctctctgggagatggttcaggatggcattgacctcaagagcatcaagtggacccaacactagaagaatagggccctgactttgtgctggtctggcccctcctgcctcaccaacccgtgcacaaccagacaccttgttacacctagtggatgctctagattggtatagaccagttgacttcagcatcagtccacctctatgacagaaacacaagaaaactgtctttccctagcttcagttccttgggtgtggagcactccccatttcttctcgggtcttaaagtgtgtggacattttcatcccgaagccatagagacatttgctgtcatattgctgctgggcacatctgtgctcttggtgaggagagcaagaggaaccagaagaagtctctttggtcagggaccatgatgctctacatggacatttgagtcttcgtcttctgctgctgctcggctggaccagcttctttaacagcaagcataatccacttcaatgtaatattttctgtagctccaaaggctatctcttcatattgactgcagacagactgaatggacagtttcttagagggcttgtctcctttctacccttgtcctctttcctttcctttgacctaatggagctagaaatatgtctgtgactccaccagttattctaataatttgttttcttgaaaattgttaatttcaagactggagaaataaactcaccttctatttactctgtgactttatgagaggttgagggaaaagtggaagctgtacttgggaattgtggagaagaccgccactccatctgatttgcataaatgactcagtgggcttttgtatctcttcatttaagaattatttgaatgcctgccaggagccagatttgttctgggtattaggaatacactggttaacaggaccaaaaaagaccctgccctcactgagttttaaattttagtggagagatggaaaataattaaacaaataaacaatgttatagattgtga

SEQ ID NO: 9828 - protein, 124 aa, Homo sapiens [sequence omitted]

SEQ ID NO: 9829 - DNA, 2656 bp, Homo sapiens
acgctcgggtcccgctctccgggaggcgcggacctgtcccctccgcgcggcgacgcaactgaatattccggagccttcctgtccaccctgctgcccagaccctctgacccttctctcaaatgacacatccctcaaactttcttaggcgggtccccgaacggttgaccccggcgcaccacccctcgcaccctgcgcgacaggcccccagagccgtggaggcgcgtccttcagaccgctcctggccaagttacagatgctgctccgggctcccgtgcagaccgttaccttcggtcagaagggactgcacctactctggctccacgttccttctaaacgtctttgccctttagagccttccttcctacgataccatttgaatatcaactcaacaccccctccaggaaccctctctccctctcccttacctccttttacagcgtgtcagttggagaccgtgctcctcagtctgcggttcccgcagatacagccgctgccccggaggtggggccagtgctgcgacctctctatatggatgtgcaagctacaactcctctggacccccgggtgcttgatgccatgctcccttacctaatcaactactatgggaacccacactcccggacacatgcttatggctgggagagtgaggcagccatggaacgtgctcgtcagcaagtagcatctctgattggagctgatcctcgtgagatcatttttactagtggtgctactgaatccaacaacatagcaattaagggggtggcccgattctacaggtcacggaaaaagcacttgatcaccacccagacagaacacaaatgtgtcttggactcctgccgttcactggaagctgagggctttcaggtcacctacctcccagtgcagaagagtgggatcattgacctaaaggaactagaggctgctatccagccagatactagcctggtgtcagtcatgactgtgaacaatgagattggagtgaagcagcctattgcagaaatagggcggatttgcagttccagaaaggtatatttccatactgatgcagcccaggctgttggaaaaatcccacttgatgtcaatgacatgaaaattgatctcatgagcattagtggtcacaaaatctacggtcccaaaggggttggtgccatctacatccgtcgccggccccgtgtgcgtgtggaggccctgcagagtggaggggggcaggagcggggtatgcggtctgggacagtgcccacacccttagtggtggggctgggggctgcgtgtgaggtggcacagcaagagatggagtatgaccacaagcgaatctcaaagttgtcagagcggctgatacagaatataatgaagagccttccagatgtggtgatgaatggggaccctaagcaccattatcccggctgtatcaacctctcctttgcatatgtggaaggggaaagtctgctgatggcactgaaggacgttgccttatcctcagggagtgcctgcacctctgcatccctggagccctcttatgtgcttagagcaattggcactgatgaggatttagcgcactcttctatcaggtttggaattggccgcttcactacagaggaggaagtggactacacagtggagaaatgcattcagcatgtgaagcgtcttcgagaaatgagccctctctgggagatggttcaggatggcattgacctcaagagcatcaagtggacccaacactagaagaatagggccctgactttgtgctggtctggcccctcctgcctcaccaacccgtgcacaaccagacaccttgttacacctagtggatgctctagattggtatagaccagttgacttcagcatcagtccacctctatgacagaaacacaagaaaactgtctttccctagcttcagttccttgggtgtggagcactccccatttcttctcgggtcttaaagtgtgtggacattttcatcccgaagccatagagacatttgctgtcatattgctgctgggcacatctgtgctcttggtgaggagagcaagaggaaccagaagaagtctctttggtcagggaccatgatgctctacatggacatttgagtcttcgtcttctgctgctgctcggctggaccagcttctttaacagcaagcataatccacttcaatgtaatattttctgtagctccaaaggctatctcttcatattgactgcagacagactgaatggacagtttcttagagggcttgtctcctttctacccttgtcctctttcctttcctttgacctaatggagctagaaatatgtctgtgactccaccagttattctaataatttgttttcttgaaaattgttaatttcaagactggagaaataaactcaccttctatttactctgtgactttatgagaggttgagggaaaagtggaagctgtacttgggaattgtggagaagaccgccactccatctgatttgcataaatgactcagtgggcttttgtatctcttcatttaagaattatttgaatgcctgccaggagccagatttgttctgggtattaggaatacactggttaacaggaccaaaaaagaccctgccctcactgagttttaaattttagtggagagatggaaaataattaaacaaataaacaatgttatagattgtga

SEQ ID NO: 9830 - protein, 397 aa, Homo sapiens
MDVQATTPLDPRVLDAMLPYLINYYGNPHSRTHAYGWESEAAMERARQQVASLIGADPREIIFTSGATESNNIAIKGVARFYRSRKKHLITTQTEHKCVLDSCRSLEAEGFQVTYLPVQKSGIIDLKELEAAIQPDTSLVSVMTVNNEIGVKQPIAEIGRICSSRKVYFHTDAAQAVGKIPLDVNDMKIDLMSISGHKIYGPKGVGAIYIRRRPRVRVEALQSGGGQERGMRSGTVPTPLVVGLGAACEVAQQEMEYDHKRISKLSERLIQNIMKSLPDVVMNGDPKHHYPGCINLSFAYVEGESLLMALKDVALSSGSACTSASLEPSYVLRAIGTDEDLAHSSIRFGIGRFTTEEEVDYTVEKCIQHVKRLREMSPLWEMVQDGIDLKSIKWTQH

SEQ ID NO: 9831 - DNA, 2096 bp, Homo sapiens
acttccgggagcctggggcccaggactgcagcggcttcggaagttggagaccgtgctcctcagtctgcggttcccgcagatacagccgctgccccggaggtggggccagtgctgcgacctctctatatggatgtgcaagctacaactcctctggacccccgggtgcttgatgccatgctcccttacctaatcaactactatgggaacccacactcccggacacatgcttatggctgggagagtgaggcagccatggaacgtgctcgtcagcaagtagcatctctgattggagctgatcctcgtgagatcatttttactagtggtgctactgaatccaacaacatagcaattaagggggtggcccgattctacaggtcacggaaaaagcacttgatcaccacccagacagaacacaaatgtgtcttggactcctgccgttcactggaagctgagggctttcaggtcacctacctcccagtgcagaagagtgggatcattgacctaaaggaactagaggctgctatccagccagatactagcctggtgtcagtcatgactgtgaacaatgagattggagtgaagcagcctattgcagaaatagggcggatttgcagttccagaaaggtatatttccatactgatgcagcccaggctgttggaaaaatcccacttgatgtcaatgacatgaaaattgatctcatgagcattagtggtcacaaaatctacggtcccaaagtatgaccacaagcgaatctcaaagttgtcagagcggctgatacagaatataatgaagagccttccagatgtggtgatgaatggggaccctaagcaccattatcccggctgtatcaacctctcctttgcatatgtggaaggggaaagtctgctgatggcactgaaggacgttgccttatcctcagggagtgcctgcacctctgcatccctggagccctcttatgtgcttagagcaattggcactgatgaggatttagcgcactcttctatcaggtttggaattggccgcttcactacagaggaggaagtggactacacagtggagaaatgcattcagcatgtgaagcgtcttcgagaaatgagccctctctgggagatggttcaggatggcattgacctcaagagcatcaagtggacccaacactagaagaatagggccctgactttgtgctggtctggcccctcctgcctcaccaacccgtgcacaaccagacaccttgttacacctagtggatgctctagattggtatagaccagttgacttcagcatcagtccacctctatgacagaaacacaagaaaactgtctttccctagcttcagttccttgggtgtggagcactccccatttcttctcgggtcttaaagtgtgtggacattttcatcccgaagccatagagacatttgctgtcatattgctgctgggcacatctgtgctcttggtgaggagagcaagaggaaccagaagaagtctctttggtcagggaccatgatgctctacatggacatttgagtcttcgtcttctgctgctgctcggctggaccagcttctttaacagcaagcataatccacttcaatgtaatattttctgtagctccaaaggctatctcttcatattgactgcagacagactgaatggacagtttcttagagggcttgtctcctttctacccttgtcctctttcctttcctttgacctaatggagctagaaatatgtctgtgactccaccagttattctaataatttgttttcttgaaaattgttaatttcaagactggagaaataaactcaccttctatttactctgtgactttatgagaggttgagggaaaagtggaagctgtacttgggaattgtggagaagaccgccactccatctgatttgcataaatgactcagtgggcttttgtatctcttcatttaagaattatttgaatgcctgccaggagccagatttgttctgggtattaggaatacactggttaacaggaccaaaaaagaccctgccctcactgagttttaaattttagtggagagatggaaaataattaaacaaataaacaatgttatagattgtga

SEQ ID NO: 9832 - protein, 204 aa, Homo sapiens
MDVQATTPLDPRVLDAMLPYLINYYGNPHSRTHAYGWESEAAMERARQQVASLIGADPREIIFTSGATESNNIAIKGVARFYRSRKKHLITTQTEHKCVLDSCRSLEAEGFQVTYLPVQKSGIIDLKELEAAIQPDTSLVSVMTVNNEIGVKQPIAEIGRICSSRKVYFHTDAAQAVGKIPLDVNDMKIDLMSISGHKIYGPKV

SEQ ID NO: 9833 - DNA, 2254 bp, Homo sapiens
acttccgggagcctggggcccaggactgcagcggcttcggaagttggagaccgtgctcctcagtctgcggttcccgcagatacagccgctgccccggaggtggggccagtgctgcgacctctctatatggatgtgcaagctacaactcctctggacccccgggtgcttgatgccatgctcccttacctaatcaactactatgggaacccacactcccggacacatgcttatggctgggagagtgaggcagccatggaacgtgctcgtcagcaagtagcatctctgattggagctgatcctcgtgagatcatttttactagtggtgctactgaatccaacaacatagcaattaagggggtggcccgattctacaggtcacggaaaaagcacttgatcaccacccagacagaacacaaatgtgtcttggactcctgccgttcactggaagctgagggctttcaggtcacctacctcccagtgcagaagagtgggatcattgacctaaaggaactagaggctgctatccagccagatactagcctggtgtcagtcatgactgtgaacaatgagattggagtgaagcagcctattgcagaaatagggcggatttgcagttccagaaaggtatatttccatactgatgcagcccaggctgttggaaaaatcccacttgatgtcaatgacatgaaaattgatctcatgagcattagtggtcacaaaatctacggtcccaaaggggttggtgccatctacatccgtcgccggccccgtgtgcgtgtggaggccctgcagagtggaggggggcaggagcggggtatgcggtctgggacagtgcccacacccttagtggtggggctgggggctgcgtgtgaggtggcacagcaagagatggagtatgaccacaagcgaatctcaaagttgtcagagcggctgatacagaatataatgaagagccttccagatgtggtgatgaatggggaccctaagcaccattatcccggctgtatcaacctctcctttgcatatgtggaaggggaaagtctgctgatggcactgaaggacgttgccttatcctcagggagtgcctgcacctctgcatccctggagccctcttatgtgcttagagcaattggcactgatgaggatttagcgcactcttctatcaggtttggaattggccgcttcactacagaggaggaagtggactacacagtggagaaatgcattcagcatgtgaagcgtcttcgagaaatgagccctctctgggagatggttcaggatggcattgacctcaagagcatcaagtggacccaacactagaagaatagggccctgactttgtgctggtctggcccctcctgcctcaccaacccgtgcacaaccagacaccttgttacacctagtggatgctctagattggtatagaccagttgacttcagcatcagtccacctctatgacagaaacacaagaaaactgtctttccctagcttcagttccttgggtgtggagcactccccatttcttctcgggtcttaaagtgtgtggacattttcatcccgaagccatagagacatttgctgtcatattgctgctgggcacatctgtgctcttggtgaggagagcaagaggaaccagaagaagtctctttggtcagggaccatgatgctctacatggacatttgagtcttcgtcttctgctgctgctcggctggaccagcttctttaacagcaagcataatccacttcaatgtaatattttctgtagctccaaaggctatctcttcatattgactgcagacagactgaatggacagtttcttagagggcttgtctcctttctacccttgtcctctttcctttcctttgacctaatggagctagaaatatgtctgtgactccaccagttattctaataatttgttttcttgaaaattgttaatttcaagactggagaaataaactcaccttctatttactctgtgactttatgagaggttgagggaaaagtggaagctgtacttgggaattgtggagaagaccgccactccatctgatttgcataaatgactcagtgggcttttgtatctcttcatttaagaattatttgaatgcctgccaggagccagatttgttctgggtattaggaatacactggttaacaggaccaaaaaagaccctgccctcactgagttttaaattttagtggagagatggaaaataattaaacaaataaacaatgttatagattgtga

SEQ ID NO: 9834 - protein, 397 aa, Homo sapiens; identical to SEQ ID NO: 9830

SEQ ID NO: 9835 - DNA, 2385 bp, Homo sapiens
agcgccgggcagcacttccgggagcctggggcccaggactgcagcggcttcggaaggtgggctctgccagcgggaccatgctgctccgagccgcttggaggcgggcggcagtggcggtgacagcggctccagggccgaagcccgcggcgcccactcgggggctgcgcctgcgcgttggagaccgtgctcctcagtctgcggttcccgcagatacagccgctgccccggaggtggggccagtgctgcgacctctctatatggatgtgcaagctacaactcctctggacccccgggtgcttgatgccatgctcccttacctaatcaactactatgggaacccacactcccggacacatgcttatggctgggagagtgaggcagccatggaacgtgctcgtcagcaagtagcatctctgattggagctgatcctcgtgagatcatttttactagtggtgctactgaatccaacaacatagcaattaagggggtggcccgattctacaggtcacggaaaaagcacttgatcaccacccagacagaacacaaatgtgtcttggactcctgccgttcactggaagctgagggctttcaggtcacctacctcccagtgcagaagagtgggatcattgacctaaaggaactagaggctgctatccagccagatactagcctggtgtcagtcatgactgtgaacaatgagattggagtgaagcagcctattgcagaaatagggcggatttgcagttccagaaaggtatatttccatactgatgcagcccaggctgttggaaaaatcccacttgatgtcaatgacatgaaaattgatctcatgagcattagtggtcacaaaatctacggtcccaaaggggttggtgccatctacatccgtcgccggccccgtgtgcgtgtggaggccctgcagagtggaggggggcaggagcggggtatgcggtctgggacagtgcccacacccttagtggtggggctgggggctgcgtgtgaggtggcacagcaagagatggagtatgaccacaagcgaatctcaaagttgtcagagcggctgatacagaatataatgaagagccttccagatgtggtgatgaatggggaccctaagcaccattatcccggctgtatcaacctctcctttgcatatgtggaaggggaaagtctgctgatggcactgaaggacgttgccttatcctcagggagtgcctgcacctctgcatccctggagccctcttatgtgcttagagcaattggcactgatgaggatttagcgcactcttctatcaggtttggaattggccgcttcactacagaggaggaagtggactacacagtggagaaatgcattcagcatgtgaagcgtcttcgagaaatgagccctctctgggagatggttcaggatggcattgacctcaagagcatcaagtggacccaacactagaagaatagggccctgactttgtgctggtctggcccctcctgcctcaccaacccgtgcacaaccagacaccttgttacacctagtggatgctctagattggtatagaccagttgacttcagcatcagtccacctctatgacagaaacacaagaaaactgtctttccctagcttcagttccttgggtgtggagcactccccatttcttctcgggtcttaaagtgtgtggacattttcatcccgaagccatagagacatttgctgtcatattgctgctgggcacatctgtgctcttggtgaggagagcaagaggaaccagaagaagtctctttggtcagggaccatgatgctctacatggacatttgagtcttcgtcttctgctgctgctcggctggaccagcttctttaacagcaagcataatccacttcaatgtaatattttctgtagctccaaaggctatctcttcatattgactgcagacagactgaatggacagtttcttagagggcttgtctcctttctacccttgtcctctttcctttcctttgacctaatggagctagaaatatgtctgtgactccaccagttattctaataatttgttttcttgaaaattgttaatttcaagactggagaaataaactcaccttctatttactctgtgactttatgagaggttgagggaaaagtggaagctgtacttgggaattgtggagaagaccgccactccatctgatttgcataaatgactcagtgggcttttgtatctcttcatttaagaattatttgaatgcctgccaggagccagatttgttctgggtattaggaatacactggttaacaggaccaaaaaagaccctgccctcactgagttttaaattttagtggagagatggaaaataattaaacaaataaacaatgttatagattgtga

SEQ ID NO: 9836 - protein, 457 aa, Homo sapiens; identical to SEQ ID NO: 1243

SEQ ID NO: 9837 - DNA, 977 bp, Homo sapiens
agaattgaagatgctccaaaggccactaagtgtttggctgcccttcaggctggtgcagatggtgcattacgtcctggggaatgcctgcacctctgcatccctggagccctcttatgtgcttagagcaattggcactgatgaggatttagcgcactcttctatcaggtttggaattggccgcttcactacagaggaggaagtggactacacagtggagaaatgcattcagcatgtgaagcgtcttcgagaaatgagccctctctgggagatggttcaggatggcattgacctcaagagcatcaagtggacccaacactagaagaatagggccctgactttgtgctggtctggcccctcctgcctcaccaacccgtgcacaaccagacaccttgttacacctagtggatgctctagattggtatagaccagttgacttcagcatcagtccacctctatgacagaaacacaagaaaactgtctttccctagcttcagttccttgggtgtggagcactccccatttcttctcgggtcttaaagtgtgtggacattttcatcccgaagccatagagacatttgctgtcatattgctgctgggcacatctgtgctcttggtgaggagagcaagaggaaccagaagaagtctctttggtcagggaccatgatgctctacatggacatttgagtcttcgtcttctgctgctgctcggctggaccagcttctttaacagcaagcataatccacttcaatgtaatattttctgtagctccaaaggctatctcttcatattgactgcagacagactgaatggacagtttcttagagggcttgtctcctttctacccttgtcctctttcctttcctttgacctaatggagctagaaatatgtctgtgactccaccagttattctaataatttgttttcttgaaaattgttaatttcaagactggagaaataaactcaccttctatttac

SEQ ID NO: 9838 - protein, 102 aa, Homo sapiens; identical to SEQ ID NO: 9826

SEQ ID NO: 9839 - DNA, 2653 bp, Homo sapiens
cagcctccctagtagctgggattacaggcatgtgccaccatgcctggctaattttgtatttttagtggagaaggggtttctccatgttggtcaggctggtctcaaactcccgaactcaggtgatccacccacctcagcctcccaaagtgctggtattacaggcgtgagccactgcgcccggccaatacatctttgttttttcaagctaaagtacagacttttttttggatttcaccagttttgtaacaatgtatcttggagattttatggtgtcagttcagaacaagcttcttcttttttttttttttttttttgggagacagagtcttgctccatcactcaggctggagtgcagtggcttgatctcagctcactgcaacctctaccacctgggttcatctcatgtctcagcctcctgagtagctgggattacatgtgcctgctaccacgcttggctaatctttgtatttttagtagagagagggtttcaccatgttgaccaggctggtttctaacttctgatctcaggtgatccgcccgccttgacctcccacagttgggattataggcgtgaaccaccacacccggccccctcattcttttatacacctgcttggtatttcattgtatggacatgccataatctatttgaccattaccctgatgatggacatctaagttgttcccagtatttttgctattatgaataatactgtaatgtatgatggcatttcatatagcatagggagctactttaaaccattttgatcattactccttctggcatttatcttccagatgttaaatattttactaaatactatgcttttactgctgtttcttcttttccttaacgttttttatttagaaaaatttcatgcttacagaaaagttgaagtaatattttgatccctttggaaagaaatattttgttttatctacttttctctctttctgttttttgtaacaaattttgtttcccaggggttggtgccatctacatccgtcgccggccccgtgtgcgtgtggaggccctgcagagtggaggggggcaggagcggggtatgcggtctgggacagtgcccacacccttagtggtggggctgggggctgcgtgtgaggtggcacagcaagagatggaggtatggggagagcagttccctcccacaacttcttcccctgtgctgggtctcctatttagaggcttctcagcatgactgaggcagatctctgcagggagagagggcttaagaaaactcttccttgtcctggtgctgctggcaccttgttctgagggagacattatgggcttcaaaacccatggccttttagtagttatcagctcatttatttctggataagtaaatgaaccctgtgtccagttatcaagcgccttttgcataccaggcactatgctcagtactggagatacagtggtccccatgagtacataggatgataggtggggctgatacatagtcacttccagttataggagaagggcttctcaaactgtctttctgagctggttaatggttactgcctaatccttccttgcctgctccttagtatgaccacaagcgaatctcaaagttgtcagagcggctgatacagaatataatgaagagccttccagatgtggtgatgaatggggaccctaagcaccattatcccggctgtatcaacctctcctttgcatatgtggaaggggaaagtctgctgatggcactgaaggacgttgccttatcctcagggagtgcctgcacctctgcatccctggagccctcttatgtgcttagagcaattggcactgatgaggatttagcgcactcttctatcaggtttggaattggccgcttcactacagaggaggaagtggactacacagtggagaaatgcattcagcatgtgaagcgtcttcgagaaatgagccctctctgggagatggttcaggatggcattgacctcaagagcatcaagtggacccaacactagaagaatagggccctgactttgtgctggtctggcccctcctgcctcaccaacccgtgcacaaccagacaccttgttacacctagtggatgctctagattggtatagaccagttgacttcagcatcagtccacctctatgacagaaacacaagaaaactgtctttccctagcttcagttccttgggtgtggagcactccccatttcttctcgggtcttaaagtgtgtggacattttcatcccgaagccatagagacatttgctgtcatattgctgctgggcacatctgtgctcttggtgaggagagcaagaggaaccagaagaagtctctttggtcagggaccatgatgctctacatggacatttgagtcttcgtcttctgctgctgctcggctggaccagcttctttaacagcaagcataatccacttcaatgtaatattttctgtagctccaaaggctatctcttcatattgactgcagacagactgaatggacagtttcttagagggcttgtctcctttctacccttgtcctctttcctttcctttgacctaatggagctagaaatatgtctgtgactccaccagttattctaataatttgttttcttgaaaattgttaatttcaagactggagaaataaactcaccttctatttac

SEQ ID NO: 9840 - protein, 124 aa, Homo sapiens [sequence omitted]

SEQ ID NO: 9841 - DNA, 1978 bp, Homo sapiens
acttccgggagcctggggcccaggactgcagcggcttcggaagttggagaccgtgctcctcagtctgcggttcccgcagatacagccgctgccccggaggtggggccagtgctgcgacctctctatatggatgtgcaagctacaactcctctggacccccgggtgcttgatgccatgctcccttacctaatcaactactatgggaacccacactcccggacacatgcttatggctgggagagtgaggcagccatggaacgtgctcgtcagcaagtagcatctctgattggagctgatcctcgtgagatcatttttactagtggtgctactgaatccaacaacatagcaattaagggggtggcccgattctacaggtcacggaaaaagcacttgatcaccacccagacagaacacaaatgtgtcttggactcctgccgttcactggaagctgagggctttcaggtcacctacctcccagtgcagaagagtgggatcattgacctaaaggaactagaggctgctatccagccagatactagcctggtgtcagtcatgactgtgaacaatgagattggagtgaagcagcctattgcagaaatagggcggatttgcagttccagaaaggtatatttccatactgatgcagcccaggctgttggaaaaatcccacttgatgtcaatgacatgaaaattgatctcatgagcattagtggtcacaaaatctacggtcccaaaggggttggtgccatctacatccgtcgccggccccgtgtgcgtgtggaggccctgcagagtggaggggggcaggagcggggtatgcggtctgggacagtgcccacacccttagtggtggggctgggggctgcgtgtgaggtggcacagcaagagatggagtatgaccacaagcgaatctcaaagttgtcagagcggctgatacagaatataatgaagagccttccagatgtggtgatgaatggggaccctaagcaccattatcccggctgtatcaacctctcctttgcatatgtggaaggggaaagtctgctgatggcactgaaggacgttgccttatcctcagggagtgcctgcacctctgcatccctggagccctcttatgtgcttagagcaattggcactgatgaggatttagcgcactcttctatcaggtttggaattggccgcttcactacagaggaggaagtggactacacagtggagaaatgcattcagcatgtgaagcgtcttcgagaaatgagccctctctgggagatggttcaggatggcattgacctcaagagcatcaagtggacccaacactagaagaatagggccctgactttgtgctggtctggcccctcctgcctcaccaacccgtgcacaaccagacaccttgttacacctagtggatgctctagattggtatagaccagttgacttcagcatcagtccacctctatgacagaaacacaagaaaactgtctttccctagcttcagttccttgggtgtggagcactccccatttcttctcgggtcttaaagtgtgtggacattttcatcccgaagccatagagacatttgctgtcatattgctgctgggcacatctgtgctcttggtgaggagagcaagaggaaccagaagaagtctctttggtcagggaccatgatgctctacatggacatttgagtcttcgtcttctgctgctgctcggctggaccagcttctttaacagcaagcataatccacttcaatgtaatattttctgtagctccaaaggctatctcttcatattgactgcagacagactgaatggacagtttcttagagggcttgtctcctttctacccttgtcctctttcctttcctttgacctaatggagctagaaatatgtctgtgactccaccagttattctaataatttgttttcttgaaaattgttaatttcaagactggagaaataaactcaccttctatttac

SEQ ID NO: 9842 - protein, 397 aa, Homo sapiens; identical to SEQ ID NO: 9830

SEQ ID NO: 9843 - DNA, 1820 bp, Homo sapiens
acttccgggagcctggggcccaggactgcagcggcttcggaagttggagaccgtgctcctcagtctgcggttcccgcagatacagccgctgccccggaggtggggccagtgctgcgacctctctatatggatgtgcaagctacaactcctctggacccccgggtgcttgatgccatgctcccttacctaatcaactactatgggaacccacactcccggacacatgcttatggctgggagagtgaggcagccatggaacgtgctcgtcagcaagtagcatctctgattggagctgatcctcgtgagatcatttttactagtggtgctactgaatccaacaacatagcaattaagggggtggcccgattctacaggtcacggaaaaagcacttgatcaccacccagacagaacacaaatgtgtcttggactcctgccgttcactggaagctgagggctttcaggtcacctacctcccagtgcagaagagtgggatcattgacctaaaggaactagaggctgctatccagccagatactagcctggtgtcagtcatgactgtgaacaatgagattggagtgaagcagcctattgcagaaatagggcggatttgcagttccagaaaggtatatttccatactgatgcagcccaggctgttggaaaaatcccacttgatgtcaatgacatgaaaattgatctcatgagcattagtggtcacaaaatctacggtcccaaagtatgaccacaagcgaatctcaaagttgtcagagcggctgatacagaatataatgaagagccttccagatgtggtgatgaatggggaccctaagcaccattatcccggctgtatcaacctctcctttgcatatgtggaaggggaaagtctgctgatggcactgaaggacgttgccttatcctcagggagtgcctgcacctctgcatccctggagccctcttatgtgcttagagcaattggcactgatgaggatttagcgcactcttctatcaggtttggaattggccgcttcactacagaggaggaagtggactacacagtggagaaatgcattcagcatgtgaagcgtcttcgagaaatgagccctctctgggagatggttcaggatggcattgacctcaagagcatcaagtggacccaacactagaagaatagggccctgactttgtgctggtctggcccctcctgcctcaccaacccgtgcacaaccagacaccttgttacacctagtggatgctctagattggtatagaccagttgacttcagcatcagtccacctctatgacagaaacacaagaaaactgtctttccctagcttcagttccttgggtgtggagcactccccatttcttctcgggtcttaaagtgtgtggacattttcatcccgaagccatagagacatttgctgtcatattgctgctgggcacatctgtgctcttggtgaggagagcaagaggaaccagaagaagtctctttggtcagggaccatgatgctctacatggacatttgagtcttcgtcttctgctgctgctcggctggaccagcttctttaacagcaagcataatccacttcaatgtaatattttctgtagctccaaaggctatctcttcatattgactgcagacagactgaatggacagtttcttagagggcttgtctcctttctacccttgtcctctttcctttcctttgacctaatggagctagaaatatgtctgtgactccaccagttattctaataatttgttttcttgaaaattgttaatttcaagactggagaaataaactcaccttctatttac

SEQ ID NO: 9844 - protein, 204 aa, Homo sapiens; identical to SEQ ID NO: 9832

SEQ ID NO: 9845 - DNA, 2109 bp, Homo sapiens
agcgccgggcagcacttccgggagcctggggcccaggactgcagcggcttcggaaggtgggctctgccagcgggaccatgctgctccgagccgcttggaggcgggcggcagtggcggtgacagcggctccagggccgaagcccgcggcgcccactcgggggctgcgcctgcgcgttggagaccgtgctcctcagtctgcggttcccgcagatacagccgctgccccggaggtggggccagtgctgcgacctctctatatggatgtgcaagctacaactcctctggacccccgggtgcttgatgccatgctcccttacctaatcaactactatgggaacccacactcccggacacatgcttatggctgggagagtgaggcagccatggaacgtgctcgtcagcaagtagcatctctgattggagctgatcctcgtgagatcatttttactagtggtgctactgaatccaacaacatagcaattaagggggtggcccgattctacaggtcacggaaaaagcacttgatcaccacccagacagaacacaaatgtgtcttggactcctgccgttcactggaagctgagggctttcaggtcacctacctcccagtgcagaagagtgggatcattgacctaaaggaactagaggctgctatccagccagatactagcctggtgtcagtcatgactgtgaacaatgagattggagtgaagcagcctattgcagaaatagggcggatttgcagttccagaaaggtatatttccatactgatgcagcccaggctgttggaaaaatcccacttgatgtcaatgacatgaaaattgatctcatgagcattagtggtcacaaaatctacggtcccaaaggggttggtgccatctacatccgtcgccggccccgtgtgcgtgtggaggccctgcagagtggaggggggcaggagcggggtatgcggtctgggacagtgcccacacccttagtggtggggctgggggctgcgtgtgaggtggcacagcaagagatggagtatgaccacaagcgaatctcaaagttgtcagagcggctgatacagaatataatgaagagccttccagatgtggtgatgaatggggaccctaagcaccattatcccggctgtatcaacctctcctttgcatatgtggaaggggaaagtctgctgatggcactgaaggacgttgccttatcctcagggagtgcctgcacctctgcatccctggagccctcttatgtgcttagagcaattggcactgatgaggatttagcgcactcttctatcaggtttggaattggccgcttcactacagaggaggaagtggactacacagtggagaaatgcattcagcatgtgaagcgtcttcgagaaatgagccctctctgggagatggttcaggatggcattgacctcaagagcatcaagtggacccaacactagaagaatagggccctgactttgtgctggtctggcccctcctgcctcaccaacccgtgcacaaccagacaccttgttacacctagtggatgctctagattggtatagaccagttgacttcagcatcagtccacctctatgacagaaacacaagaaaactgtctttccctagcttcagttccttgggtgtggagcactccccatttcttctcgggtcttaaagtgtgtggacattttcatcccgaagccatagagacatttgctgtcatattgctgctgggcacatctgtgctcttggtgaggagagcaagaggaaccagaagaagtctctttggtcagggaccatgatgctctacatggacatttgagtcttcgtcttctgctgctgctcggctggaccagcttctttaacagcaagcataatccacttcaatgtaatattttctgtagctccaaaggctatctcttcatattgactgcagacagactgaatggacagtttcttagagggcttgtctcctttctacccttgtcctctttcctttcctttgacctaatggagctagaaatatgtctgtgactccaccagttattctaataatttgttttcttgaaaattgttaatttcaagactggagaaataaactcaccttctatttac

SEQ ID NO: 9846 - protein, 457 aa, Homo sapiens; identical to SEQ ID NO: 1243

SEQ ID NO: 9847 - DNA, 1461 bp, Homo sapiens
aaagttgaagtaatattttgatccctttggaaagaaatattttgttttatctacttttctctctttctgttttttgtaacaaattttgtttcccaggggttggtgccatctacatccgtcgccggccccgtgtgcgtgtggaggccctgcagagtggaggggggcaggagcggggtatgcggtctgggacagtgcccacacccttagtggtggggctgggggctgcgtgtgaggtggcacagcaagagatggaggtatggggagagcagttccctcccacaacttcttcccctgtgctgggtctcctatttagaggcttctcagcatgactgaggcagatctctgcagggagagagggcttaagaaaactcttccttgtcctggtgctgctggcaccttgttctgagggagacattatgggcttcaaaacccatggccttttagtagttatcagctcatttatttctggataagtaaatgaaccctgtgtccagttatcaagcgccttttgcataccaggcactatgctcagtactggagatacagtggtccccatgagtacataggatgataggtggggctgatacatagtcacttccagttataggagaagggcttctcaaactgtctttctgagctggttaatggttactgcctaatccttccttgcctgctccttagtatgaccacaagcgaatctcaaagttgtcagagcggctgatacagaatataatgaagagccttccagatgtggtgatgaatggggaccctaagcaccattatcccggctgtatcaacctctcctttgcatatgtggaaggggaaagtctgctgatggcactgaaggacgttgccttatcctcagggaggtgagctggacggcatagacagggcctgcggcagggccacttagaagagtcatacaggctattaaacttcccagtgtggagatgataggcacaagacctcttgattaagggtaaaggtcattttgtaagtgcctctctttttttggttggctgggtagctgggtacagactgaagtttaccaccctaggaagacttcctggggtagaattttgtgccttttatcgtcccaggggatgtatgtgtctgttgtgggttacactagcagttctgttacaggcctctagaattgaagatgctccaaaggccactaagtgtttggctgcccttcaggctggtgcagatggtgcattacgtcctggggaagtgagcacatggtcctctgctgcgtcttcttgtcaaacccatgtggtatcatgctctgtcacactttgccagcgtccttgcttaaggaagtcatccaccatgggggccagaggagctaggttcacacatcctaggatgtgcaggggagcatcaggtcctttagttctgccagattagaaggtctcttgttttctccagggtatgactccagggccctgggggatggga

SEQ ID NO: 9848 - protein, 46 aa, Homo sapiens
MKSLPDVVMNGDPKHHYPGCINLSFAYVEGESLLMALKDVALSSGR

SEQ ID NO: 9849 - DNA, 529 bp, Homo sapiens
agcacttccgggagcctggggcccaggactgcagcggcttcggaaggtgggctctgccagcgggaccatgctgctccgagccgcttggaggcgggcggcagtggcggtgacagcggctccagggccgaagcccgcggcgcccactcgggggctgcgcctgcgcgttggagaccgtgctcctcagtctgcggttcccgcagatacagccgctgccccggaggtggggccagtgctgcgacctcccaaagtgccccacaaccatttttacttactgatacatggtctcattctgtcacctaggctggggtgcagttgcacaatcacagctcactggagccttgaactcctggactcaagcaatcctctcatcttagcctcccaagtagctaggcttacaggcgtgtactagcacgcctgtctaattttgttattttaatttatttatttatttttttttgagatggagcctggctctgtcgcccaggctggagtgcagtggcgtgatctcagctcactgcaagctctgcct

SEQ ID NO: 9850 - protein, 113 aa, Homo sapiens
MLLRAAWRRAAVAVTAAPGPKPAAPTRGLRLRVGDRAPQSAVPADTAAAPEVGPVLRPPKVPHNHFYLLIHGLILSPRLGCSCTITAHWSLELLDSSNPLILASQVARLTGVY

SEQ ID NO: 9851 - DNA, 789 bp, Homo sapiens
agcacttccgggagcctggggcccaggactgcagcggcttcggaaggtgggctctgccagcgggaccatgctgctccgagccgcttggaggcgggcggcagtggcggtgacagcggctccagggccgaagcccgcggcgcccactcgggggctgcgcctgcgcgttggagaccgtgctcctcagtctgcggttcccgcagatacagccgctgccccggaggtggggccagtgctgcgacctctctatatggatgtgcaagctacaactcctctggacccccgggtgcttgatgccatgctcccttacctaatcaactactatgggaacccacactcccggacacatgcttatggctgggagagtgaggcagccatggaacgtgctcgtcagcaagtagcatctctgattggagctgatcctcgtgagatcatttttactagtggtgctactgaatccaacaacatagcaattaagactgagtctcactctgtcatccaggctggagtgcagtggcacgatcttgactcactgcaagctccgcctcctgggttcacgccattctcctgcctcagcctcctgagtagctgggactacaggcgccctccaccacacccggctaattttttgtatttttagtagagacagggtttcactgtgttagccagaatggtctcgatctcctgacctcgtgatccgccctcctcggcctcccaaagtgccccacaaccatttttacttactgatgtaaatactttttaggataaaatagagtataaatcaattataaa

SEQ ID NO: 9852 - protein, 189 aa, Homo sapiens
MLLRAAWRRAAVAVTAAPGPKPAAPTRGLRLRVGDRAPQSAVPADTAAAPEVGPVLRPLYMDVQATTPLDPRVLDAMLPYLINYYGNPHSRTHAYGWESEAAMERARQQVASLIGADPREIIFTSGATESNNIAIKTESHSVIQAGVQWHDLDSLQAPPPGFTPFSCLSLLSSWDYRRPPPHPANFLYF

SEQ ID NO: 9853 - DNA, 464 bp, Homo sapiens
acgctcgggtcccgctctccgggaggcgcggacctgtcccctccgcgcggcgacgcaactgaatattccggagccttcctgtccaccctgctgcccagaccctctgacccttctctcaaatgacacatccctcaaactttcttaggcgggtccccgaacggttgaccccggcgcaccacccctcgcaccctgcgcgacaggcccccagagccgtggaggcgcgtccttcagaccgctcctggccaagttacagatgctgctccgggctcccgtgcagaccgttaccttcggtcagaagggactgcacctactctggctccacgttccttctaaacgtctttgccctttagagccttccttcctacgataccatttgaatatcaactcaacaccccctccaggaaccctctctccctctcccttacctccttttacagcgtgtcagttggagaccgtgctcctca

SEQ ID NO: 9854 - protein, 69 aa, Homo sapiens
MLLRAPVQTVTFGQKGLHLLWLHVPSKRLCPLEPSFLRYHLNINSTPPPGTLSPSPLPPFTACQLETVL

SEQ ID NO: 9855 - DNA, 502 bp, Homo sapiens
gcggctcggagcagcatggtcccgctggcagagcccaccttccgaagccgctgcagtcctgggccccaggctcccggaagtgctgcccggcgctccggaagcgattcatcgggccgcgagcgccctccccgtcgttttccgtgagagacgtagagctgagcgacccagcccgcgagcgaggtgagatgccggtggccgtgggtccctacggacagtcccagccaagctgcttcgaccgtgtcaaaatgggcttcgtgatgggttgcgccgtgggcatggcggccggggcgctcttcggcaccttttcctgtctcaggatcggaatgcggggtcgagagctgatgggcggcattgggaaaaccatgatgcagagtggcggcacctttggcacattcatggccattgggatgggcatccgatgctaaccatggttgccaactacatctgtcccttcccatcaatcccagcccatgtactaataaaagaaagtctttgagtagtc

SEQ ID NO: 9856 - protein, 79 aa, Homo sapiens; identical to SEQ ID NO: 1245

SEQ ID NO: 9857 - DNA, 519 bp, Homo sapiens
gcggctcggagcagcatggtcccgctggcagagcccaccttccgaagccgctgcagtcctgggccccaggctcccggaagtgctgcccggcgctccggaagcgattcatcgggccgcgagcgccctccccgtcgttttccgtgagagacgtagagctgagcgacccagcccgcgagcgaggtgagatgccggtggccgtgggtccctacggacagtcccagccaagctgcttcgaccgtgtcaaaatgggcttcgtgatgggttgcgccgtgggcatggcggccggggcgctcttcggcaccttttcctgtctcaggatcggaatgcggggtcgagagctgatgggcggcattgggaaaaccatgatgcagagtggcggcacctttggcacattcatggccattgggatgggcatccgatgctaaccatggttgccaactacatctgtcccttcccatcaatcccagcccatgtactaataaaagaaagtctttgagtagtcagtgtccctctcttaaa

SEQ ID NO: 9858 - protein, 79 aa, Homo sapiens; identical to SEQ ID NO: 1245

SEQ ID NO: 9859 - DNA, 535 bp, Homo sapiens
gagacgtagagctgagcgacccagcccgcgagcgaggtgaggtaggcgccgggcgacgcggggccggaacgcgaagagggtggtggagtcgggctacccactgattttccttcccttacttcccctgagcccttgggcccacttcccagcctaccgcttccgtccccgcccgactcttgggccagcgcctgggcccacactttcctatcccccgcagatgccggtggccgtgggtccctacggacagtcccagccaagctgcttcgaccgtgtcaaaatgggcttcgtgatgggttgcgccgtgggcatggcggccggggcgctcttcggcaccttttcctgtctcaggatcggaatgcggggtcgagagctgatgggcggcattgggaaaaccatgatgcagagtggcggcacctttggcacattcatggccattgggatgggcatccgatgctaaccatggttgccaactacatctgtcccttcccatcaatcccagcccatgtactaataaaagaaagtctttgagtagtca

SEQ ID NO: 9860 - protein, 79 aa, Homo sapiens; identical to SEQ ID NO: 1245

SEQ ID NO: 9861 - DNA, 359 bp, Homo sapiens
gaggtaggcgccgggcgacgcggggccggaacgcgaagaggatgccggtggccgtgggtccctacggacagtcccagccaagctgcttcgaccgtgtcaaaatgggcttcgtgatgggttgcgccgtgggcatggcggccggggcgctcttcggcaccttttcctgtctcaggatcggaatgcggggtcgagagctgatgggcggcattgggaaaaccatgatgcagagtggcggcacctttggcacattcatggccattgggatgggcatccgatgctaaccatggttgccaactacatctgtcccttcccatcaatcccagcccatgtactaataaaagaaagtctttgagtagtca

SEQ ID NO: 9862 - protein, 79 aa, Homo sapiens; identical to SEQ ID NO: 1245

SEQ ID NO: 9863 - DNA, 1774 bp, Homo sapiens
gctgggattacaggcatgagtcaccgcgcccggcctcattgaaaatttatttttcaataccagactgcagtgttctttggggcagagacgttctgtcaatgtgctttttttccaaagtattttttttaattcatagaatatttaaattttttgatacatttgtaaatatatagtttgttagtttcaatagtatttaagagtccttaatactttcttacagagaagaagaagttggatgggataccgagattaaggatgatgtgattgaagaatgtaataaacatggaggagttattcatatttatgttgacaaaaattcagctcagggcaatgtgtatgtgaagtgcccatcaattgctgcagctattgctgctgtcaatgcattgcatggcaggtggtttgctggtaaaatgataacagcagcatatgtacctcttccaacttaccacaacctgtttcctgattctatgacagcaacacagctactggttccaagtagacgatgaaggaagatatagtcccttatgtatatagctttttttctttcttgagaattcatcttgagttatcttttatttagataaaaataaagaggcaaggatctactgtcatttgtatgcaatttcctgttaccttgaaaaaataaaaatgttaacaggaatgcagtgtgctcattctccctaaatagtaaatcccactgtatacaaaactgttctcttgttctgccttttaaaatgttcatgtagaaaattaatgaactataggaatagctctaggagaacaaatgtgctttctgtaaaaaggcagaccagggatgtaatgtttttaatgtttcagaagcctaactttttacacagtggttacatttcacatttcactaatgttgatatttggctgatggttgagcagtttctgaaatacacatttagtgtatggaaatacaagacagctaaagggctgtttggttagcatctcatcttgcattctgatcaattggcaagaaagggagatttcaaaattatatttcttgatggtatcttttcaattaatgtatctgtaaaagtttctttgtaaatactatgtgttctggtgtgtcttaaaattccaaacaaaatgatccctgcatttcctgaagatgtttaaacgtgagagtctggtaggcaaagcagtctgagaaagaaataggaaatgcagaaataggttttgtctggttgcatataatctttgctctttttaagctctgtgagctctgaaatatatttttgggttacttcagtgtgtttgacaagacagcttgatatttctatcaaacaaatgactttcatattgcaacaatctttgtaagaaccactcaaataaaagtctcttaaaaaggccacaggagatcttcatttttcaaatgttttaaagttacagaaatttgagaacagaattagcttcttttagtctcaattcagtacttgcctcttgggaaaatgttccgagtctgcggaaacttgccctcacgttgtcccccatgaattcctttattctattagagtctagccctgtgtattttagaagaatgtatcaaaactgaggggtttaccaaaaagaaaaggaaacagcctggccttaaaacctgggcattcttggtctcctgcattgtctgggcatatttatgaagaaattttcaccatttacaatacatacttaacaaaatggcttaacttcaaactggtttccaaaattgatttatatattaatatattaaataaggtgcatatattactgt

SEQ ID NO: 9864 - protein, 71 aa, Homo sapiens [sequence omitted]

SEQ ID NO: 9865 - DNA, 2403 bp, Homo sapiens
atgaaatttggtcagataatatgattacggtgagttctgtaacagctactggtaatatttttgtaaatcacgtgaaagcattggagcaactgtcttggaaaatgctctttaaacttcaaaccccagtatgttttggtagtagtggatattacacatatatgctgctcttttcagtgttcttttattgtgcgaaaacatttttaaaacatttgatttattaataggatttatttttaataggattgttaataggatttatttttctaggacattgtctttaaacacttggatgattttatatgtcttaattctttaataatttgtagatttaaaaaacttcgtgggcagaaagcgaagaaataggaaaggatatagatttatttggcatttcaaaggattttgttttattatcccctcttatttgggtataaactcaaatctattttatccttcatctgtttggattgatgtgtattgagattttgtctaattgaactgattttgataacacataaagtttaatttccctgttaaaataggactcccaaatttctgaatgtctgtttcaagtattaggttacctcagttttctggcacctaaaagctactgataacatacattagtagcaatattaaataaggtaaaataactccagtgacatcctagttacatgcttggggtgggtttttggtttcgttttaaagtatttatgagggatactttcatgcattttccatgaaactaatttttctctttctttttttagcttcagctttagctgcagctgcctctgttcagccacttgcaacacaatgtttccaactctctaacatgtttaaccctcaaacagaagaagaagttggatgggataccgagattaaggatgatgtgattgaagaatgtaataaacatggaggagttattcatatttatgttgacaaaaattcagctcagggcaatgtgtatgtgaagtgcccatcaattgctgcagctattgctgctgtcaatgcattgcatggcaggtggtttgctggtaaaatgataacagcagcatatgtacctcttccaacttaccacaacctgtttcctgattctatgacagcaacacagctactggttccaagtagacgatgaaggaagatatagtcccttatgtatatagctttttttctttcttgagaattcatcttgagttatcttttatttagataaaaataaagaggcaaggatctactgtcatttgtatgcaatttcctgttaccttgaaaaaataaaaatgttaacaggaatgcagtgtgctcattctccctaaatagtaaatcccactgtatacaaaactgttctcttgttctgccttttaaaatgttcatgtagaaaattaatgaactataggaatagctctaggagaacaaatgtgctttctgtaaaaaggcagaccagggatgtaatgtttttaatgtttcagaagcctaactttttacacagtggttacatttcacatttcactaatgttgatatttggctgatggttgagcagtttctgaaatacacatttagtgtatggaaatacaagacagctaaagggctgtttggttagcatctcatcttgcattctgatcaattggcaagaaagggagatttcaaaattatatttcttgatggtatcttttcaattaatgtatctgtaaaagtttctttgtaaatactatgtgttctggtgtgtcttaaaattccaaacaaaatgatccctgcatttcctgaagatgtttaaacgtgagagtctggtaggcaaagcagtctgagaaagaaataggaaatgcagaaataggttttgtctggttgcatataatctttgctctttttaagctctgtgagctctgaaatatatttttgggttacttcagtgtgtttgacaagacagcttgatatttctatcaaacaaatgactttcatattgcaacaatctttgtaagaaccactcaaataaaagtctcttaaaaaggccacaggagatcttcatttttcaaatgttttaaagttacagaaatttgagaacagaattagcttcttttagtctcaattcagtacttgcctcttgggaaaatgttccgagtctgcggaaacttgccctcacgttgtcccccatgaattcctttattctattagagtctagccctgtgtattttagaagaatgtatcaaaactgaggggtttaccaaaaagaaaaggaaacagcctggccttaaaacctgggcattcttggtctcctgcattgtctgggcatatttatgaagaaattttcaccatttacaatacatacttaacaaaatggcttaacttcaaactggtttccaaaattgatttatatattaatatattaaataaggtgcatatattactgt

SEQ ID NO: 9866 - protein, 132 aa, Homo sapiens [sequence omitted]

SEQ ID NO: 9867 - DNA, 3494 bp, Homo sapiens
attatgagaaagatatgtcatgttccatcacagtcaagaattaaattttttcacaaacaagatgcttctaatcagtgctgttttgttaagagatttttaaaagattttcctagatttactgtgttctgcattgatctagcttgaacgtgaatgtttgtatagtacgttttcttaatattttttagtattcatagtatataatcatactaaacttgagaaactggaagaatcaagtcttcctcagttctgtttagactttctagttttttttaaggatacttccatatcttctgtaagctacacagtgagcttcatttttgcacagttataatacactctcgaatctttaacttttttccagcagaatttgacatgttatattaaaattttgttttatttaaaataaaactttatgaaagaaaaaacttatatgttacagagaagctaaagcacctgtaatgctaccagaaagttatcatttatgatatatttcatgcacagccctaatttctcggtgtaatatttctgatactttaagtgatcgtttattttaattaccataatttctaatgcactgttttatccttagctttgtttgttattatgttttggaatgaaatttggtcagataatatgattacggtgagttctgtaacagctactggtaatatttttgtaaatcacgtgaaagcattggagcaactgtcttggaaaatgctctttaaacttcaaaccccagtatgttttggtagtagtggatattacacatatatgctgctcttttcagtgttcttttattgtgcgaaaacatttttaaaacatttgatttattaataggatttatttttaataggattgttaataggatttatttttctaggacattgtctttaaacacttggatgattttatatgtcttaattctttaataatttgtagatttaaaaaacttcgtgggcagaaagcgaagaaataggaaaggatatagatttatttggcatttcaaaggattttgttttattatcccctcttatttgggtataaactcaaatctattttatccttcatctgtttggattgatgtgtattgagattttgtctaattgaactgattttgataacacataaagtttaatttccctgttaaaataggactcccaaatttctgaatgtctgtttcaagtattaggttacctcagttttctggcacctaaaagctactgataacatacattagtagcaatattaaataaggtaaaataactccagtgacatcctagttacatgcttggggtgggtttttggtttcgttttaaagtatttatgagggatactttcatgcattttccatgaaactaatttttctctttctttttttagcttcagctttagctgcagctgcctctgttcagccacttgcaacacaatgtttccaactctctaacatgtttaaccctcaaacagaagaagaagttggatgggataccgagattaaggatgatgtgattgaagaatgtaataaacatggaggagttattcatatttatgttgacaaaaattcagctcaggtattttcatctttttttataaatgatgttaggttgttcgtctctaccttaatcttcgcacattatgtggtgcatgttatggttaaccgtcttccattatagtttttgtgtgtgtgtgcctgaaagtagctttaatatagtggctaaataaaccctccaaaataaaagaaaatcagtaacaatttgatcagggtatgagaggatttctagtaatgctcaaagcttgccatgaaatcttggcatcttgattcattcttaggctgcatacaaatcgtagagaaaagataaaacggcaaatttgagagtagaagtcattttttaataaaattctagtatacctattagccagtggaaccattatggtaaaccagtttgtggttatagagcactaagtttctacaggcaacttgaataaacataacttgggtccattttgcatacagcaacatctttaccttttttttcattttttctgtagggcaatgtgtatgtgaagtgcccatcaattgctgcagctattgctgctgtcaatgcattgcatggcaggtggtttgctggtaaaatgataacagcagcatatgtacctcttccaacttaccacaacctgtttcctgattctatgacagcaacacagctactggttccaagtagacgatgaaggaagatatagtcccttatgtatatagctttttttctttcttgagaattcatcttgagttatcttttatttagataaaaataaagaggcaaggatctactgtcatttgtatgcaatttcctgttaccttgaaaaaataaaaatgttaacaggaatgcagtgtgctcattctccctaaatagtaaatcccactgtatacaaaactgttctcttgttctgccttttaaaatgttcatgtagaaaattaatgaactataggaatagctctaggagaacaaatgtgctttctgtaaaaaggcagaccagggatgtaatgtttttaatgtttcagaagcctaactttttacacagtggttacatttcacatttcactaatgttgatatttggctgatggttgagcagtttctgaaatacacatttagtgtatggaaatacaagacagctaaagggctgtttggttagcatctcatcttgcattctgatcaattggcaagaaagggagatttcaaaattatatttcttgatggtatcttttcaattaatgtatctgtaaaagtttctttgtaaatactatgtgttctggtgtgtcttaaaattccaaacaaaatgatccctgcatttcctgaagatgtttaaacgtgagagtctggtaggcaaagcagtctgagaaagaaataggaaatgcagaaataggttttgtctggttgcatataatctttgctctttttaagctctgtgagctctgaaatatatttttgggttacttcagtgtgtttgacaagacagcttgatatttctatcaaacaaatgactttcatattgcaacaatctttgtaagaaccactcaaataaaagtctcttaaaaaggccacaggagatcttcatttttcaaatgttttaaagttacagaaatttgagaacagaattagcttcttttagtctcaattcagtacttgcctcttgggaaaatgttccgagtctgcggaaacttgccctcacgttgtcccccatgaattcctttattctattagagtctagccctgtgtattttagaagaatgtatcaaaactgaggggtttaccaaaaagaaaaggaaacagcctggccttaaaacctgggcattcttggtctcctgcattgtctgggcatatttatgaagaaattttcaccatttacaatacatacttaacaaaatggcttaacttcaaactggtttccaaaattgatttatatattaatatattaaataaggtgcatatattactgt

SEQ ID NO: 9868 - protein, 106 aa, Homo sapiens
MKLIFLFLFLASALAAAASVQPLATQCFQLSNMFNPQTEEEVGWDTEIKDDVIEECNKHGGVIHIYVDKNSAQVFSSFFINDVRLFVSTLIFAHYVVHVMVNRLPL

SEQ ID NO: 9869 - DNA, 1946 bp, Homo sapiens
gggatttaagtgaaccacctcccttggcctcccagagtgctagctaagttacaggcgtcaaccaccacactcggccctccttgcaatttattttagtgaagtgatcatgatattaatgacccaggaaacttcgtttctctgctctcaacatagtaggaactttaagactattcttttacaggtacaggtttgcagattccgccagcagcacagcaagctctacagatgagtggctctttggcatttggtgctgtggcagaattctcttttgttatagatttgcaaacaagactttcccagcagactgaagcttcagctttagctgcagctgcctctgttcagccacttgcaacacaatgtttccaactctctaacatgtttaaccctcaaacagaagaagaagttggatgggataccgagattaaggatgatgtgattgaagaatgtaataaacatggaggagttattcatatttatgttgacaaaaattcagctcagggcaatgtgtatgtgaagtgcccatcaattgctgcagctattgctgctgtcaatgcattgcatggcaggtggtttgctggtaaaatgataacagcagcatatgtacctcttccaacttaccacaacctgtttcctgattctatgacagcaacacagctactggttccaagtagacgatgaaggaagatatagtcccttatgtatatagctttttttctttcttgagaattcatcttgagttatcttttatttagataaaaataaagaggcaaggatctactgtcatttgtatgcaatttcctgttaccttgaaaaaataaaaatgttaacaggaatgcagtgtgctcattctccctaaatagtaaatcccactgtatacaaaactgttctcttgttctgccttttaaaatgttcatgtagaaaattaatgaactataggaatagctctaggagaacaaatgtgctttctgtaaaaaggcagaccagggatgtaatgtttttaatgtttcagaagcctaactttttacacagtggttacatttcacatttcactaatgttgatatttggctgatggttgagcagtttctgaaatacacatttagtgtatggaaatacaagacagctaaagggctgtttggttagcatctcatcttgcattctgatcaattggcaagaaagggagatttcaaaattatatttcttgatggtatcttttcaattaatgtatctgtaaaagtttctttgtaaatactatgtgttctggtgtgtcttaaaattccaaacaaaatgatccctgcatttcctgaagatgtttaaacgtgagagtctggtaggcaaagcagtctgagaaagaaataggaaatgcagaaataggttttgtctggttgcatataatctttgctctttttaagctctgtgagctctgaaatatatttttgggttacttcagtgtgtttgacaagacagcttgatatttctatcaaacaaatgactttcatattgcaacaatctttgtaagaaccactcaaataaaagtctcttaaaaaggccacaggagatcttcatttttcaaatgttttaaagttacagaaatttgagaacagaattagcttcttttagtctcaattcagtacttgcctcttgggaaaatgttccgagtctgcggaaacttgccctcacgttgtcccccatgaattcctttattctattagagtctagccctgtgtattttagaagaatgtatcaaaactgaggggtttaccaaaaagaaaaggaaacagcctggccttaaaacctgggcattcttggtctcctgcattgtctgggcatatttatgaagaaattttcaccatttacaatacatacttaacaaaatggcttaacttcaaactggtttccaaaattgatttatatattaatatattaaataaggtgcatatattactgt

SEQ ID NO: 9870 - protein, 150 aa, Homo sapiens
MSGSLAFGAVAEFSFVIDLQTRLSQQTEASALAAAASVQPLATQCFQLSNMFNPQTEEEVGWDTEIKDDVIEECNKHGGVIHIYVDKNSAQGNVYVKCPSIAAAIAAVNALHGRWFAGKMITAAYVPLPTYHNLFPDSMTATQLLVPSRR

SEQ ID NO: 9871 - DNA, 3454 bp, Homo sapiens
attctattgtaagtttgttttattaatttattttgtggattacagtaatgcttttgttggcctgttgtatgacaaactatttaaaggttcacattttgatttgtatttgccaacaagcccttttgcttgttaaagctatagctaactctcaggagataattgcagttctactcttagaggatggtgtctttcaaataatgtcttgtctgctgattttcagtaatgttaatataaggcaaaagggatattgtttactatacgtagcaatttttttagacagagtcttactctgtcgcccaggctggagtaccagtggcgggatcttggctcactgcaacctccgcttcccgggtttgagcaattctcctgccttagcctcccgagtagctgggactacaggcgcacggtactatgcccggctaatttttgtatttttattagggacggggtttcactacattggccagactggtcttgaactcctgaccttgtgatctgcctgcctcggcctaccaaagtgctgagattacaggatttttttttttttttaagtatgattatgtaccattgtatcatagtaaaactagccaaagaaatttatgaaaggatgaaaaaatgattctggccataaaaggtagtatattttggtgggttcttaagccagcatgataatggcgagtttttttcttctcaggaggaaaaaaagcaagagcagaagtcgtagtcatgaacgaaagagaagcaaaagtaaggaacggaagcgaagtagagacagagaaaggaaaaagagcaaaagccgtgaaagaaagcgaagtagaagcaaagagaggcgacggagccgctcaagaagtcgagatcgaagatttagaggccgctacagaagtccttactccggaccaaaatttaacagtgccatccgaggaaagattgggttgcctcatagcatcaaattaagcagacgacgttcccgaagcaaaagtccattcagaaaagacaagagccctgtgagagaacctattgataatttaactcctgaggaaagagatgcaaggacagtcttctgtatgcagctggcggcaagaattcgaccaagggatttggaagagtttttctctacagtaggaaaggttcgagatgtgaggatgatttctgacagaaattcaagacgttccaaaggaattgcttatgtggagttcgtcgatgttagctcagtgcctctagcaataggattaactggccaacgagttttaggcgtgccaatcatagtacaggcatcacaggcagaaaaaaacagagctgcagcaatggcaaacaatttacaaaagggaagtgctggacctatgaggctttatgtgggctcattacacttcaacataactgaagatatgcttcgtgggatctttgagccttttggaagaattgaaagtatccagctgatgatggacagtgaaactggtcgatccaagggatatggatttattacattttctgactcagaatgtgccaaaaaggctttggaacaacttaatggatttgaactagcaggaagaccaatgaaagttggtcatgttactgaacgtactgatgcttcgagtgctagttcatttttggacagtgatgaactggaaaggactggaattgatttgggaacaactggtcgtcttcagttaatggcaagacttgcagagggtacaggtttgcagattccgccagcagcacagcaagctctacagatgagtggctctttggcatttggtgctgtggcagaattctcttttgttatagatttgcaaacaagactttcccagcagactgaagcttcagctttagctgcagctgcctctgttcagccacttgcaacacaatgtttccaactctctaacatgtttaaccctcaaacagaagaagaagttggatgggataccgagattaaggatgatgtgattgaagaatgtaataaacatggaggagttattcatatttatgttgacaaaaattcagctcagggcaatgtgtatgtgaagtgcccatcaattgctgcagctattgctgctgtcaatgcattgcatggcaggtggtttgctggtaaaatgataacagcagcatatgtacctcttccaacttaccacaacctgtttcctgattctatgacagcaacacagctactggttccaagtagacgatgaaggaagatatagtcccttatgtatatagctttttttctttcttgagaattcatcttgagttatcttttatttagataaaaataaagaggcaaggatctactgtcatttgtatgcaatttcctgttaccttgaaaaaataaaaatgttaacaggaatgcagtgtgctcattctccctaaatagtaaatcccactgtatacaaaactgttctcttgttctgccttttaaaatgttcatgtagaaaattaatgaactataggaatagctctaggagaacaaatgtgctttctgtaaaaaggcagaccagggatgtaatgtttttaatgtttcagaagcctaactttttacacagtggttacatttcacatttcactaatgttgatatttggctgatggttgagcagtttctgaaatacacatttagtgtatggaaatacaagacagctaaagggctgtttggttagcatctcatcttgcattctgatcaattggcaagaaagggagatttcaaaattatatttcttgatggtatcttttcaattaatgtatctgtaaaagtttctttgtaaatactatgtgttctggtgtgtcttaaaattccaaacaaaatgatccctgcatttcctgaagatgtttaaacgtgagagtctggtaggcaaagcagtctgagaaagaaataggaaatgcagaaataggttttgtctggttgcatataatctttgctctttttaagctctgtgagctctgaaatatatttttgggttacttcagtgtgtttgacaagacagcttgatatttctatcaaacaaatgactttcatattgcaacaatctttgtaagaaccactcaaataaaagtctcttaaaaaggccacaggagatcttcatttttcaaatgttttaaagttacagaaatttgagaacagaattagcttcttttagtctcaattcagtacttgcctcttgggaaaatgttccgagtctgcggaaacttgccctcacgttgtcccccatgaattcctttattctattagagtctagccctgtgtattttagaagaatgtatcaaaactgaggggtttaccaaaaagaaaaggaaacagcctggccttaaaacctgggcattcttggtctcctgcattgtctgggcatatttatgaagaaattttcaccatttacaatacatacttaacaaaatggcttaacttcaaactggtttccaaaattgatttatatattaatatattaaataaggtgcatatattactgt

SEQ ID NO: 9872 - protein, 506 aa, Homo sapiens
MIMASFFLLRRKKSKSRSRSHERKRSKSKERKRSRDRERKKSKSRERKRSRSKERRRSRSRSRDRRFRGRYRSPYSGPKFNSAIRGKIGLPHSIKLSRRRSRSKSPFRKDKSPVREPIDNLTPEERDARTVFCMQLAARIRPRDLEEFFSTVGKVRDVRMISDRNSRRSKGIAYVEFVDVSSVPLAIGLTGQRVLGVPIIVQASQAEKNRAAAMANNLQKGSAGPMRLYVGSLHFNITEDMLRGIFEPFGRIESIQLMMDSETGRSKGYGFITFSDSECAKKALEQLNGFELAGRPMKVGHVTERTDASSASSFLDSDELERTGIDLGTTGRLQLMARLAEGTGLQIPPAAQQALQMSGSLAFGAVAEFSFVIDLQTRLSQQTEASALAAAASVQPLATQCFQLSNMFNPQTEEEVGWDTEIKDDVIEECNKHGGVIHIYVDKNSAQGNVYVKCPSIAAAIAAVNALHGRWFAGKMITAAYVPLPTYHNLFPDSMTATQLLVPSRR

SEQ ID NO: 9873 - DNA, 1638 bp, Homo sapiens
ggtgaatgtgagtacagggaagcagcggccgccatttcagggagcttgtcgacgctgtcgcaggggtggatcctgagctgccgaagccgccgtcctgctctcccgcgtgggcttctctaattccattgttttttttagattctctcgggcctagccgtccttggaacccgatattcgggctgggcggttccgcggcctgggcctagggtgcccatcaattgctgcagctattgctgctgtcaatgcattgcatggcaggtggtttgctggtaaaatgataacagcagcatatgtacctcttccaacttaccacaacctgtttcctgattctatgacagcaacacagctactggttccaagtagacgatgaaggaagatatagtcccttatgtatatagctttttttctttcttgagaattcatcttgagttatcttttatttagataaaaataaagaggcaaggatctactgtcatttgtatgcaatttcctgttaccttgaaaaaataaaaatgttaacaggaatgcagtgtgctcattctccctaaatagtaaatcccactgtatacaaaactgttctcttgttctgccttttaaaatgttcatgtagaaaattaatgaactataggaatagctctaggagaacaaatgtgctttctgtaaaaaggcagaccagggatgtaatgtttttaatgtttcagaagcctaactttttacacagtggttacatttcacatttcactaatgttgatatttggctgatggttgagcagtttctgaaatacacatttagtgtatggaaatacaagacagctaaagggctgtttggttagcatctcatcttgcattctgatcaattggcaagaaagggagatttcaaaattatatttcttgatggtatcttttcaattaatgtatctgtaaaagtttctttgtaaatactatgtgttctggtgtgtcttaaaattccaaacaaaatgatccctgcatttcctgaagatgtttaaacgtgagagtctggtaggcaaagcagtctgagaaagaaataggaaatgcagaaataggttttgtctggttgcatataatctttgctctttttaagctctgtgagctctgaaatatatttttgggttacttcagtgtgtttgacaagacagcttgatatttctatcaaacaaatgactttcatattgcaacaatctttgtaagaaccactcaaataaaagtctcttaaaaaggccacaggagatcttcatttttcaaatgttttaaagttacagaaatttgagaacagaattagcttcttttagtctcaattcagtacttgcctcttgggaaaatgttccgagtctgcggaaacttgccctcacgttgtcccccatgaattcctttattctattagagtctagccctgtgtattttagaagaatgtatcaaaactgaggggtttaccaaaaagaaaaggaaacagcctggccttaaaacctgggcattcttggtctcctgcattgtctgggcatatttatgaagaaattttcaccatttacaatacatacttaacaaaatggcttaacttcaaactggtttccaaaattgatttatatattaatatattaaataaggtgcatatattactgt

SEQ ID NO: 9874 - protein, 71 aa, Homo sapiens [sequence omitted]

SEQ ID NO: 9875 - DNA, 3277 bp, Homo sapiens
tgtgtgtgtgtatgtgtgctggtgaatgtgagtacagggaagcagcggccgccatttcagggagcttgtcgacgctgtcgcaggggtggatcctgagctgccgaagccgccgtcctgctctcccgcgtgggcttctctaattccattgttttttttagattctctcgggcctagccgtccttggaacccgatattcgggctgggcggttccgcggcctgggcctaggggcttaacagtagcaacagaagcggcggcggcggcagcagcagcagcagcagcagcaatctcttcccgaacacgagcaccacaggcgcccgaaggccggaacaggcgtttagagaaaatggcagacgatattgatattgaagcaatgcttgaggctccttacaagaaggatgagaacaagttgagcagtgccaacggccatgaagaacgtagcaaaaaacaaactttctgcctccttggaaagctctacatctccttgtgattggagtgtgggtttcaagattccagaaggaggaaaaaaagcaagagcagaagtcgtagtcatgaacgaaagagaagcaaaagtaaggaacggaagcgaagtagagacagagaaaggaaaaagagcaaaagccgtgaaagaaagcgaagtagaagcaaagagaggcgacggagccgctcaagaagtcgagatcgaagatttagaggccgctacagaagtccttactccggaccaaaatttaacagtgccatccgaggaaagattgggttgcctcatagcatcaaattaagcagacgacgttcccgaagcaaaagtccattcagaaaagacaagagccctgtgagagaacctattgataatttaactcctgaggaaagagatgcaaggacagtcttctgtatgcagctggcggcaagaattcgaccaagggatttggaagagtttttctctacagtaggaaaggttcgagatgtgaggatgatttctgacagaaattcaagacgttccaaaggaattgcttatgtggagttcgtcgatgttagctcagtgcctctagcaataggattaactggccaacgagttttaggcgtgccaatcatagtacaggcatcacaggcagaaaaaaacagagctgcagcaatggcaaacaatttacaaaagggaagtgctggacctatgaggctttatgtgggctcattacacttcaacataactgaagatatgcttcgtgggatctttgagccttttggaagaattgaaagtatccagctgatgatggacagtgaaactggtcgatccaagggatatggatttattacattttctgactcagaatgtgccaaaaaggctttggaacaacttaatggatttgaactagcaggaagaccaatgaaagttggtcatgttactgaacgtactgatgcttcgagtgctagttcatttttggacagtgatgaactggaaaggactggaattgatttgggaacaactggtcgtcttcagttaatggcaagacttgcagagggtacaggtttgcagattccgccagcagcacagcaagctctacagatgagtggctctttggcatttggtgctgtggcagaattctcttttgttatagatttgcaaacaagactttcccagcagactgaagcttcagctttagctgcagctgcctctgttcagccacttgcaacacaatgtttccaactctctaacatgtttaaccctcaaacagaagaagaagttggatgggataccgagattaaggatgatgtgattgaagaatgtaataaacatggaggagttattcatatttatgttgacaaaaattcagctcagggcaatgtgtatgtgaagtgcccatcaattgctgcagctattgctgctgtcaatgcattgcatggcaggtggtttgctggtaaaatgataacagcagcatatgtacctcttccaacttaccacaacctgtttcctgattctatgacagcaacacagctactggttccaagtagacgatgaaggaagatatagtcccttatgtatatagctttttttctttcttgagaattcatcttgagttatcttttatttagataaaaataaagaggcaaggatctactgtcatttgtatgcaatttcctgttaccttgaaaaaataaaaatgttaacaggaatgcagtgtgctcattctccctaaatagtaaatcccactgtatacaaaactgttctcttgttctgccttttaaaatgttcatgtagaaaattaatgaactataggaatagctctaggagaacaaatgtgctttctgtaaaaaggcagaccagggatgtaatgtttttaatgtttcagaagcctaactttttacacagtggttacatttcacatttcactaatgttgatatttggctgatggttgagcagtttctgaaatacacatttagtgtatggaaatacaagacagctaaagggctgtttggttagcatctcatcttgcattctgatcaattggcaagaaagggagatttcaaaattatatttcttgatggtatcttttcaattaatgtatctgtaaaagtttctttgtaaatactatgtgttctggtgtgtcttaaaattccaaacaaaatgatccctgcatttcctgaagatgtttaaacgtgagagtctggtaggcaaagcagtctgagaaagaaataggaaatgcagaaataggttttgtctggttgcatataatctttgctctttttaagctctgtgagctctgaaatatatttttgggttacttcagtgtgtttgacaagacagcttgatatttctatcaaacaaatgactttcatattgcaacaatctttgtaagaaccactcaaataaaagtctcttaaaaaggccacaggagatcttcatttttcaaatgttttaaagttacagaaatttgagaacagaattagcttcttttagtctcaattcagtacttgcctcttgggaaaatgttccgagtctgcggaaacttgccctcacgttgtcccccatgaattcctttattctattagagtctagccctgtgtattttagaagaatgtatcaaaactgaggggtttaccaaaaagaaaaggaaacagcctggccttaaaacctgggcattcttggtctcctgcattgtctgggcatatttatgaagaaattttcaccatttacaatacatacttaacaaaatggcttaacttcaaactggtttccaaaattgatttatatattaatatattaaataaggtgcatatattactgt

SEQ ID NO: 9876 - protein, 373 aa, Homo sapiens
MQLAARIRPRDLEEFFSTVGKVRDVRMISDRNSRRSKGIAYVEFVDVSSVPLAIGLTGQRVLGVPIIVQASQAEKNRAAAMANNLQKGSAGPMRLYVGSLHFNITEDMLRGIFEPFGRIESIQLMMDSETGRSKGYGFITFSDSECAKKALEQLNGFELAGRPMKVGHVTERTDASSASSFLDSDELERTGIDLGTTGRLQLMARLAEGTGLQIPPAAQQALQMSGSLAFGAVAEFSFVIDLQTRLSQQTEASALAAAASVQPLATQCFQLSNMFNPQTEEEVGWDTEIKDDVIEECNKHGGVIHIYVDKNSAQGNVYVKCPSIAAAIAAVNALHGRWFAGKMITAAYVPLPTYHNLFPDSMTATQLLVPSRR

SEQ ID NO: 9877 - DNA, 3246 bp, Homo sapiens
gcgagagcccgtgctgagggctctgtgaggccccgtgtgtttgtgtgtgtgtatgtgtgctggtgaatgtgagtacagggaagcagcggccgccatttcagggagcttgtcgacgctgtcgcaggggtggatcctgagctgccgaagccgccgtcctgctctcccgcgtgggcttctctaattccattgttttttttagattctctcgggcctagccgtccttggaacccgatattcgggctgggcggttccgcggcctgggcctaggggcttaacagtagcaacagaagcggcggcggcggcagcagcagcagcagcagcagcaatctcttcccgaacacgagcaccacaggcgcccgaaggccggaacaggcgtttagagaaaatggcagacgatattgatattgaagcaatgcttgaggctccttacaagaaggatgagaacaagttgagcagtgccaacggccatgaagaacgtagcaaaaagaggaaaaaaagcaagagcagaagtcgtagtcatgaacgaaagagaagcaaaagtaaggaacggaagcgaagtagagacagagaaaggaaaaagagcaaaagccgtgaaagaaagcgaagtagaagcaaagagaggcgacggagccgctcaagaagtcgagatcgaagatttagaggccgctacagaagtccttactccggaccaaaatttaacagtgccatccgaggaaagattgggttgcctcatagcatcaaattaagcagacgacgttcccgaagcaaaagtccattcagaaaagacaagagccctgtgagagaacctattgataatttaactcctgaggaaagagatgcaaggacagtcttctgtatgcagctggcggcaagaattcgaccaagggatttggaagagtttttctctacagtaggaaaggttcgagatgtgaggatgatttctgacagaaattcaagacgttccaaaggaattgcttatgtggagttcgtcgatgttagctcagtgcctctagcaataggattaactggccaacgagttttaggcgtgccaatcatagtacaggcatcacaggcagaaaaaaacagagctgcagcaatggcaaacaatttacaaaagggaagtgctggacctatgaggctttatgtgggctcattacacttcaacataactgaagatatgcttcgtgggatctttgagccttttggaagaattgaaagtatccagctgatgatggacagtgaaactggtcgatccaagggatatggatttattacattttctgactcagaatgtgccaaaaaggctttggaacaacttaatggatttgaactagcaggaagaccaatgaaagttggtcatgttactgaacgtactgatgcttcgagtgctagttcatttttggacagtgatgaactggaaaggactggaattgatttgggaacaactggtcgtcttcagttaatggcaagacttgcagagggtacaggtttgcagattccgccagcagcacagcaagctctacagatgagtggctctttggcatttggtgctgtggcagaattctcttttgttatagatttgcaaacaagactttcccagcagactgaagcttcagctttagctgcagctgcctctgttcagccacttgcaacacaatgtttccaactctctaacatgtttaaccctcaaacagaagaagaagttggatgggataccgagattaaggatgatgtgattgaagaatgtaataaacatggaggagttattcatatttatgttgacaaaaattcagctcagggcaatgtgtatgtgaagtgcccatcaattgctgcagctattgctgctgtcaatgcattgcatggcaggtggtttgctggtaaaatgataacagcagcatatgtacctcttccaacttaccacaacctgtttcctgattctatgacagcaacacagctactggttccaagtagacgatgaaggaagatatagtcccttatgtatatagctttttttctttcttgagaattcatcttgagttatcttttatttagataaaaataaagaggcaaggatctactgtcatttgtatgcaatttcctgttaccttgaaaaaataaaaatgttaacaggaatgcagtgtgctcattctccctaaatagtaaatcccactgtatacaaaactgttctcttgttctgccttttaaaatgttcatgtagaaaattaatgaactataggaatagctctaggagaacaaatgtgctttctgtaaaaaggcagaccagggatgtaatgtttttaatgtttcagaagcctaactttttacacagtggttacatttcacatttcactaatgttgatatttggctgatggttgagcagtttctgaaatacacatttagtgtatggaaatacaagacagctaaagggctgtttggttagcatctcatcttgcattctgatcaattggcaagaaagggagatttcaaaattatatttcttgatggtatcttttcaattaatgtatctgtaaaagtttctttgtaaatactatgtgttctggtgtgtcttaaaattccaaacaaaatgatccctgcatttcctgaagatgtttaaacgtgagagtctggtaggcaaagcagtctgagaaagaaataggaaatgcagaaataggttttgtctggttgcatataatctttgctctttttaagctctgtgagctctgaaatatatttttgggttacttcagtgtgtttgacaagacagcttgatatttctatcaaacaaatgactttcatattgcaacaatctttgtaagaaccactcaaataaaagtctcttaaaaaggccacaggagatcttcatttttcaaatgttttaaagttacagaaatttgagaacagaattagcttcttttagtctcaattcagtacttgcctcttgggaaaatgttccgagtctgcggaaacttgccctcacgttgtcccccatgaattcctttattctattagagtctagccctgtgtattttagaagaatgtatcaaaactgaggggtttaccaaaaagaaaaggaaacagcctggccttaaaacctgggcattcttggtctcctgcattgtctgggcatatttatgaagaaattttcaccatttacaatacatacttaacaaaatggcttaacttcaaactggtttccaaaattgatttatatattaatatattaaataaggtgcatatattactgt

SEQ ID NO: 9878 - protein, 530 aa, Homo sapiens; identical to SEQ ID NO: 1249

SEQ ID NO: 9879 - DNA, 3345 bp, Homo sapiens
aaatttggagcttggggcagcttctcgcgagagcccgtgctgagggctctgtgaggccccgtgtgtttgtgtgtgtgtatgtgtgctggtgaatgtgagtacagggaagcagcggccgccatttcagggagcttgtcgacgctgtcgcaggggtggatcctgagctgccgaagccgccgtcctgctctcccgcgtgggcttctctaattccattgttttttttagattctctcgggcctagccgtccttggaacccgatattcgggctgggcggttccgcggcctgggcctaggggcttaacagtagcaacagaagcggcggcggcggcagcagcagcagcagcagcagcaatctcttcccgaacacgagcaccacaggcgcccgaaggccggaacaggcgtttagagaaaatggcagacgatattgatattgaagcaatgcttgaggctccttacaagaagacttgcctaacgatatctcacctctactcccatgaattcacctttgattccagtgtgaactgtcaatcataaggatgagaacaagttgagcagtgccaacggccatgaagaacgtagcaaaaagaggaaaaaaagcaagagcagaagtcgtagtcatgaacgaaagagaagcaaaagtaaggaacggaagcgaagtagagacagagaaaggaaaaagagcaaaagccgtgaaagaaagcgaagtagaagcaaagagaggcgacggagccgctcaagaagtcgagatcgaagatttagaggccgctacagaagtccttactccggaccaaaatttaacagtgccatccgaggaaagattgggttgcctcatagcatcaaattaagcagacgacgttcccgaagcaaaagtccattcagaaaagacaagagccctgtgagagaacctattgataatttaactcctgaggaaagagatgcaaggacagtcttctgtatgcagctggcggcaagaattcgaccaagggatttggaagagtttttctctacagtaggaaaggttcgagatgtgaggatgatttctgacagaaattcaagacgttccaaaggaattgcttatgtggagttcgtcgatgttagctcagtgcctctagcaataggattaactggccaacgagttttaggcgtgccaatcatagtacaggcatcacaggcagaaaaaaacagagctgcagcaatggcaaacaatttacaaaagggaagtgctggacctatgaggctttatgtgggctcattacacttcaacataactgaagatatgcttcgtgggatctttgagccttttggaagaattgaaagtatccagctgatgatggacagtgaaactggtcgatccaagggatatggatttattacattttctgactcagaatgtgccaaaaaggctttggaacaacttaatggatttgaactagcaggaagaccaatgaaagttggtcatgttactgaacgtactgatgcttcgagtgctagttcatttttggacagtgatgaactggaaaggactggaattgatttgggaacaactggtcgtcttcagttaatggcaagacttgcagagggtacaggtttgcagattccgccagcagcacagcaagctctacagatgagtggctctttggcatttggtgctgtggcagaattctcttttgttatagatttgcaaacaagactttcccagcagactgaagcttcagctttagctgcagctgcctctgttcagccacttgcaacacaatgtttccaactctctaacatgtttaaccctcaaacagaagaagaagttggatgggataccgagattaaggatgatgtgattgaagaatgtaataaacatggaggagttattcatatttatgttgacaaaaattcagctcagggcaatgtgtatgtgaagtgcccatcaattgctgcagctattgctgctgtcaatgcattgcatggcaggtggtttgctggtaaaatgataacagcagcatatgtacctcttccaacttaccacaacctgtttcctgattctatgacagcaacacagctactggttccaagtagacgatgaaggaagatatagtcccttatgtatatagctttttttctttcttgagaattcatcttgagttatcttttatttagataaaaataaagaggcaaggatctactgtcatttgtatgcaatttcctgttaccttgaaaaaataaaaatgttaacaggaatgcagtgtgctcattctccctaaatagtaaatcccactgtatacaaaactgttctcttgttctgccttttaaaatgttcatgtagaaaattaatgaactataggaatagctctaggagaacaaatgtgctttctgtaaaaaggcagaccagggatgtaatgtttttaatgtttcagaagcctaactttttacacagtggttacatttcacatttcactaatgttgatatttggctgatggttgagcagtttctgaaatacacatttagtgtatggaaatacaagacagctaaagggctgtttggttagcatctcatcttgcattctgatcaattggcaagaaagggagatttcaaaattatatttcttgatggtatcttttcaattaatgtatctgtaaaagtttctttgtaaatactatgtgttctggtgtgtcttaaaattccaaacaaaatgatccctgcatttcctgaagatgtttaaacgtgagagtctggtaggcaaagcagtctgagaaagaaataggaaatgcagaaataggttttgtctggttgcatataatctttgctctttttaagctctgtgagctctgaaatatatttttgggttacttcagtgtgtttgacaagacagcttgatatttctatcaaacaaatgactttcatattgcaacaatctttgtaagaaccactcaaataaaagtctcttaaaaaggccacaggagatcttcatttttcaaatgttttaaagttacagaaatttgagaacagaattagcttcttttagtctcaattcagtacttgcctcttgggaaaatgttccgagtctgcggaaacttgccctcacgttgtcccccatgaattcctttattctattagagtctagccctgtgtattttagaagaatgtatcaaaactgaggggtttaccaaaaagaaaaggaaacagcctggccttaaaacctgggcattcttggtctcctgcattgtctgggcatatttatgaagaaattttcaccatttacaatacatacttaacaaaatggcttaacttcaaactggtttccaaaattgatttatatattaatatattaaataaggtgcatatattactgt

SEQ ID NO: 9880 - protein, 373 aa, Homo sapiens; identical to SEQ ID NO: 9876

SEQ ID NO: 9881 - DNA, 1377 bp, Homo sapiens
gctgggattacaggcatgagtcaccgcgcccggcctcattgaaaatttatttttcaataccagactgcagtgttctttggggcagagacgttctgtcaatgtgctttttttccaaagtattttttttaattcatagaatatttaaattttttgatacatttgtaaatatatagtttgttagtttcaatagtatttaagagtccttaatactttcttacagagaagaagaagttggatgggataccgagattaaggatgatgtgattgaagaatgtaataaacatggaggagttattcatatttatgttgacaaaaattcagctcagggcaatgtgtatgtgaagtgcccatcaattgctgcagctattgctgctgtcaatgcattgcatggcaggtggtttgctggtaaaatgataacagcagcatatgtacctcttccaacttaccacaacctgtttcctgattctatgacagcaacacagctactggttccaagtagacgatgaaggaagatatagtcccttatgtatatagctttttttctttcttgagaattcatcttgagttatcttttatttagataaaaataaagaggcaaggatctactgtcatttgtatgcaatttcctgttaccttgaaaaaataaaaatgttaacaggaatgcagtgtgctcattctccctaaatagtaaatcccactgtatacaaaactgttctcttgttctgccttttaaaatgttcatgtagaaaattaatgaactataggaatagctctaggagaacaaatgtgctttctgtaaaaaggcagaccagggatgtaatgtttttaatgtttcagaagcctaactttttacacagtggttacatttcacatttcactaatgttgatatttggctgatggttgagcagtttctgaaatacacatttagtgtatggaaatacaagacagctaaagggctgtttggttagcatctcatcttgcattctgatcaattggcaagaaagggagatttcaaaattatatttcttgatggtatcttttcaattaatgtatctgtaaaagtttctttgtaaatactatgtgttctggtgtgtcttaaaattccaaacaaaatgatccctgcatttcctgaagatgtttaaacgtgagagtctggtaggcaaagcagtctgagaaagaaataggaaatgcagaaataggttttgtctggttgcatataatctttgctctttttaagctctgtgagctctgaaatatatttttgggttacttcagtgtgtttgacaagacagcttgatatttctatcaaacaaatgactttcatattgcaacaatctttgtaagaaccactcaaataaaagtctcttaaaaaggcc

SEQ ID NO: 9882 - protein, 71 aa, Homo sapiens [sequence omitted]

SEQ ID NO: 9883 - DNA, 2006 bp, Homo sapiens
atgaaatttggtcagataatatgattacggtgagttctgtaacagctactggtaatatttttgtaaatcacgtgaaagcattggagcaactgtcttggaaaatgctctttaaacttcaaaccccagtatgttttggtagtagtggatattacacatatatgctgctcttttcagtgttcttttattgtgcgaaaacatttttaaaacatttgatttattaataggatttatttttaataggattgttaataggatttatttttctaggacattgtctttaaacacttggatgattttatatgtcttaattctttaataatttgtagatttaaaaaacttcgtgggcagaaagcgaagaaataggaaaggatatagatttatttggcatttcaaaggattttgttttattatcccctcttatttgggtataaactcaaatctattttatccttcatctgtttggattgatgtgtattgagattttgtctaattgaactgattttgataacacataaagtttaatttccctgttaaaataggactcccaaatttctgaatgtctgtttcaagtattaggttacctcagttttctggcacctaaaagctactgataacatacattagtagcaatattaaataaggtaaaataactccagtgacatcctagttacatgcttggggtgggtttttggtttcgttttaaagtatttatgagggatactttcatgcattttccatgaaactaatttttctctttctttttttagcttcagctttagctgcagctgcctctgttcagccacttgcaacacaatgtttccaactctctaacatgtttaaccctcaaacagaagaagaagttggatgggataccgagattaaggatgatgtgattgaagaatgtaataaacatggaggagttattcatatttatgttgacaaaaattcagctcagggcaatgtgtatgtgaagtgcccatcaattgctgcagctattgctgctgtcaatgcattgcatggcaggtggtttgctggtaaaatgataacagcagcatatgtacctcttccaacttaccacaacctgtttcctgattctatgacagcaacacagctactggttccaagtagacgatgaaggaagatatagtcccttatgtatatagctttttttctttcttgagaattcatcttgagttatcttttatttagataaaaataaagaggcaaggatctactgtcatttgtatgcaatttcctgttaccttgaaaaaataaaaatgttaacaggaatgcagtgtgctcattctccctaaatagtaaatcccactgtatacaaaactgttctcttgttctgccttttaaaatgttcatgtagaaaattaatgaactataggaatagctctaggagaacaaatgtgctttctgtaaaaaggcagaccagggatgtaatgtttttaatgtttcagaagcctaactttttacacagtggttacatttcacatttcactaatgttgatatttggctgatggttgagcagtttctgaaatacacatttagtgtatggaaatacaagacagctaaagggctgtttggttagcatctcatcttgcattctgatcaattggcaagaaagggagatttcaaaattatatttcttgatggtatcttttcaattaatgtatctgtaaaagtttctttgtaaatactatgtgttctggtgtgtcttaaaattccaaacaaaatgatccctgcatttcctgaagatgtttaaacgtgagagtctggtaggcaaagcagtctgagaaagaaataggaaatgcagaaataggttttgtctggttgcatataatctttgctctttttaagctctgtgagctctgaaatatatttttgggttacttcagtgtgtttgacaagacagcttgatatttctatcaaacaaatgactttcatattgcaacaatctttgtaagaaccactcaaataaaagtctcttaaaaaggcc

SEQ ID NO: 9884 - protein, 132 aa, Homo sapiens [sequence omitted]

SEQ ID NO: 9885 - DNA, 3097 bp, Homo sapiens
attatgagaaagatatgtcatgttccatcacagtcaagaattaaattttttcacaaacaagatgcttctaatcagtgctgttttgttaagagatttttaaaagattttcctagatttactgtgttctgcattgatctagcttgaacgtgaatgtttgtatagtacgttttcttaatattttttagtattcatagtatataatcatactaaacttgagaaactggaagaatcaagtcttcctcagttctgtttagactttctagttttttttaaggatacttccatatcttctgtaagctacacagtgagcttcatttttgcacagttataatacactctcgaatctttaacttttttccagcagaatttgacatgttatattaaaattttgttttatttaaaataaaactttatgaaagaaaaaacttatatgttacagagaagctaaagcacctgtaatgctaccagaaagttatcatttatgatatatttcatgcacagccctaatttctcggtgtaatatttctgatactttaagtgatcgtttattttaattaccataatttctaatgcactgttttatccttagctttgtttgttattatgttttggaatgaaatttggtcagataatatgattacggtgagttctgtaacagctactggtaatatttttgtaaatcacgtgaaagcattggagcaactgtcttggaaaatgctctttaaacttcaaaccccagtatgttttggtagtagtggatattacacatatatgctgctcttttcagtgttcttttattgtgcgaaaacatttttaaaacatttgatttattaataggatttatttttaataggattgttaataggatttatttttctaggacattgtctttaaacacttggatgattttatatgtcttaattctttaataatttgtagatttaaaaaacttcgtgggcagaaagcgaagaaataggaaaggatatagatttatttggcatttcaaaggattttgttttattatcccctcttatttgggtataaactcaaatctattttatccttcatctgtttggattgatgtgtattgagattttgtctaattgaactgattttgataacacataaagtttaatttccctgttaaaataggactcccaaatttctgaatgtctgtttcaagtattaggttacctcagttttctggcacctaaaagctactgataacatacattagtagcaatattaaataaggtaaaataactccagtgacatcctagttacatgcttggggtgggtttttggtttcgttttaaagtatttatgagggatactttcatgcattttccatgaaactaatttttctctttctttttttagcttcagctttagctgcagctgcctctgttcagccacttgcaacacaatgtttccaactctctaacatgtttaaccctcaaacagaagaagaagttggatgggataccgagattaaggatgatgtgattgaagaatgtaataaacatggaggagttattcatatttatgttgacaaaaattcagctcaggtattttcatctttttttataaatgatgttaggttgttcgtctctaccttaatcttcgcacattatgtggtgcatgttatggttaaccgtcttccattatagtttttgtgtgtgtgtgcctgaaagtagctttaatatagtggctaaataaaccctccaaaataaaagaaaatcagtaacaatttgatcagggtatgagaggatttctagtaatgctcaaagcttgccatgaaatcttggcatcttgattcattcttaggctgcatacaaatcgtagagaaaagataaaacggcaaatttgagagtagaagtcattttttaataaaattctagtatacctattagccagtggaaccattatggtaaaccagtttgtggttatagagcactaagtttctacaggcaacttgaataaacataacttgggtccattttgcatacagcaacatctttaccttttttttcattttttctgtagggcaatgtgtatgtgaagtgcccatcaattgctgcagctattgctgctgtcaatgcattgcatggcaggtggtttgctggtaaaatgataacagcagcatatgtacctcttccaacttaccacaacctgtttcctgattctatgacagcaacacagctactggttccaagtagacgatgaaggaagatatagtcccttatgtatatagctttttttctttcttgagaattcatcttgagttatcttttatttagataaaaataaagaggcaaggatctactgtcatttgtatgcaatttcctgttaccttgaaaaaataaaaatgttaacaggaatgcagtgtgctcattctccctaaatagtaaatcccactgtatacaaaactgttctcttgttctgccttttaaaatgttcatgtagaaaattaatgaactataggaatagctctaggagaacaaatgtgctttctgtaaaaaggcagaccagggatgtaatgtttttaatgtttcagaagcctaactttttacacagtggttacatttcacatttcactaatgttgatatttggctgatggttgagcagtttctgaaatacacatttagtgtatggaaatacaagacagctaaagggctgtttggttagcatctcatcttgcattctgatcaattggcaagaaagggagatttcaaaattatatttcttgatggtatcttttcaattaatgtatctgtaaaagtttctttgtaaatactatgtgttctggtgtgtcttaaaattccaaacaaaatgatccctgcatttcctgaagatgtttaaacgtgagagtctggtaggcaaagcagtctgagaaagaaataggaaatgcagaaataggttttgtctggttgcatataatctttgctctttttaagctctgtgagctctgaaatatatttttgggttacttcagtgtgtttgacaagacagcttgatatttctatcaaacaaatgactttcatattgcaacaatctttgtaagaaccactcaaataaaagtctcttaaaaaggcc

SEQ ID NO: 9886 - protein, 106 aa, Homo sapiens; identical to SEQ ID NO: 9868

SEQ ID NO: 9887 - DNA, 1549 bp, Homo sapiens
gggatttaagtgaaccacctcccttggcctcccagagtgctagctaagttacaggcgtcaaccaccacactcggccctccttgcaatttattttagtgaagtgatcatgatattaatgacccaggaaacttcgtttctctgctctcaacatagtaggaactttaagactattcttttacaggtacaggtttgcagattccgccagcagcacagcaagctctacagatgagtggctctttggcatttggtgctgtggcagaattctcttttgttatagatttgcaaacaagactttcccagcagactgaagcttcagctttagctgcagctgcctctgttcagccacttgcaacacaatgtttccaactctctaacatgtttaaccctcaaacagaagaagaagttggatgggataccgagattaaggatgatgtgattgaagaatgtaataaacatggaggagttattcatatttatgttgacaaaaattcagctcagggcaatgtgtatgtgaagtgcccatcaattgctgcagctattgctgctgtcaatgcattgcatggcaggtggtttgctggtaaaatgataacagcagcatatgtacctcttccaacttaccacaacctgtttcctgattctatgacagcaacacagctactggttccaagtagacgatgaaggaagatatagtcccttatgtatatagctttttttctttcttgagaattcatcttgagttatcttttatttagataaaaataaagaggcaaggatctactgtcatttgtatgcaatttcctgttaccttgaaaaaataaaaatgttaacaggaatgcagtgtgctcattctccctaaatagtaaatcccactgtatacaaaactgttctcttgttctgccttttaaaatgttcatgtagaaaattaatgaactataggaatagctctaggagaacaaatgtgctttctgtaaaaaggcagaccagggatgtaatgtttttaatgtttcagaagcctaactttttacacagtggttacatttcacatttcactaatgttgatatttggctgatggttgagcagtttctgaaatacacatttagtgtatggaaatacaagacagctaaagggctgtttggttagcatctcatcttgcattctgatcaattggcaagaaagggagatttcaaaattatatttcttgatggtatcttttcaattaatgtatctgtaaaagtttctttgtaaatactatgtgttctggtgtgtcttaaaattccaaacaaaatgatccctgcatttcctgaagatgtttaaacgtgagagtctggtaggcaaagcagtctgagaaagaaataggaaatgcagaaataggttttgtctggttgcatataatctttgctctttttaagctctgtgagctctgaaatatatttttgggttacttcagtgtgtttgacaagacagcttgatatttctatcaaacaaatgactttcatattgcaacaatctttgtaagaaccactcaaataaaagtctcttaaaaaggcc

SEQ ID NO: 9888 - protein, 150 aa, Homo sapiens; identical to SEQ ID NO: 9870

SEQ ID NO: 9889 - DNA, 3057 bp, Homo sapiens
attctattgtaagtttgttttattaatttattttgtggattacagtaatgcttttgttggcctgttgtatgacaaactatttaaaggttcacattttgatttgtatttgccaacaagcccttttgcttgttaaagctatagctaactctcaggagataattgcagttctactcttagaggatggtgtctttcaaataatgtcttgtctgctgattttcagtaatgttaatataaggcaaaagggatattgtttactatacgtagcaatttttttagacagagtcttactctgtcgcccaggctggagtaccagtggcgggatcttggctcactgcaacctccgcttcccgggtttgagcaattctcctgccttagcctcccgagtagctgggactacaggcgcacggtactatgcccggctaatttttgtatttttattagggacggggtttcactacattggccagactggtcttgaactcctgaccttgtgatctgcctgcctcggcctaccaaagtgctgagattacaggatttttttttttttttaagtatgattatgtaccattgtatcatagtaaaactagccaaagaaatttatgaaaggatgaaaaaatgattctggccataaaaggtagtatattttggtgggttcttaagccagcatgataatggcgagtttttttcttctcaggaggaaaaaaagcaagagcagaagtcgtagtcatgaacgaaagagaagcaaaagtaaggaacggaagcgaagtagagacagagaaaggaaaaagagcaaaagccgtgaaagaaagcgaagtagaagcaaagagaggcgacggagccgctcaagaagtcgagatcgaagatttagaggccgctacagaagtccttactccggaccaaaatttaacagtgccatccgaggaaagattgggttgcctcatagcatcaaattaagcagacgacgttcccgaagcaaaagtccattcagaaaagacaagagccctgtgagagaacctattgataatttaactcctgaggaaagagatgcaaggacagtcttctgtatgcagctggcggcaagaattcgaccaagggatttggaagagtttttctctacagtaggaaaggttcgagatgtgaggatgatttctgacagaaattcaagacgttccaaaggaattgcttatgtggagttcgtcgatgttagctcagtgcctctagcaataggattaactggccaacgagttttaggcgtgccaatcatagtacaggcatcacaggcagaaaaaaacagagctgcagcaatggcaaacaatttacaaaagggaagtgctggacctatgaggctttatgtgggctcattacacttcaacataactgaagatatgcttcgtgggatctttgagccttttggaagaattgaaagtatccagctgatgatggacagtgaaactggtcgatccaagggatatggatttattacattttctgactcagaatgtgccaaaaaggctttggaacaacttaatggatttgaactagcaggaagaccaatgaaagttggtcatgttactgaacgtactgatgcttcgagtgctagttcatttttggacagtgatgaactggaaaggactggaattgatttgggaacaactggtcgtcttcagttaatggcaagacttgcagagggtacaggtttgcagattccgccagcagcacagcaagctctacagatgagtggctctttggcatttggtgctgtggcagaattctcttttgttatagatttgcaaacaagactttcccagcagactgaagcttcagctttagctgcagctgcctctgttcagccacttgcaacacaatgtttccaactctctaacatgtttaaccctcaaacagaagaagaagttggatgggataccgagattaaggatgatgtgattgaagaatgtaataaacatggaggagttattcatatttatgttgacaaaaattcagctcagggcaatgtgtatgtgaagtgcccatcaattgctgcagctattgctgctgtcaatgcattgcatggcaggtggtttgctggtaaaatgataacagcagcatatgtacctcttccaacttaccacaacctgtttcctgattctatgacagcaacacagctactggttccaagtagacgatgaaggaagatatagtcccttatgtatatagctttttttctttcttgagaattcatcttgagttatcttttatttagataaaaataaagaggcaaggatctactgtcatttgtatgcaatttcctgttaccttgaaaaaataaaaatgttaacaggaatgcagtgtgctcattctccctaaatagtaaatcccactgtatacaaaactgttctcttgttctgccttttaaaatgttcatgtagaaaattaatgaactataggaatagctctaggagaacaaatgtgctttctgtaaaaaggcagaccagggatgtaatgtttttaatgtttcagaagcctaactttttacacagtggttacatttcacatttcactaatgttgatatttggctgatggttgagcagtttctgaaatacacatttagtgtatggaaatacaagacagctaaagggctgtttggttagcatctcatcttgcattctgatcaattggcaagaaagggagatttcaaaattatatttcttgatggtatcttttcaattaatgtatctgtaaaagtttctttgtaaatactatgtgttctggtgtgtcttaaaattccaaacaaaatgatccctgcatttcctgaagatgtttaaacgtgagagtctggtaggcaaagcagtctgagaaagaaataggaaatgcagaaataggttttgtctggttgcatataatctttgctctttttaagctctgtgagctctgaaatatatttttgggttacttcagtgtgtttgacaagacagcttgatatttctatcaaacaaatgactttcatattgcaacaatctttgtaagaaccactcaaataaaagtctcttaaaaaggcc

SEQ ID NO: 9890 - protein, 506 aa, Homo sapiens; identical to SEQ ID NO: 9872

SEQ ID NO: 9891 - DNA, 1241 bp, Homo sapiens
ggtgaatgtgagtacagggaagcagcggccgccatttcagggagcttgtcgacgctgtcgcaggggtggatcctgagctgccgaagccgccgtcctgctctcccgcgtgggcttctctaattccattgttttttttagattctctcgggcctagccgtccttggaacccgatattcgggctgggcggttccgcggcctgggcctagggtgcccatcaattgctgcagctattgctgctgtcaatgcattgcatggcaggtggtttgctggtaaaatgataacagcagcatatgtacctcttccaacttaccacaacctgtttcctgattctatgacagcaacacagctactggttccaagtagacgatgaaggaagatatagtcccttatgtatatagctttttttctttcttgagaattcatcttgagttatcttttatttagataaaaataaagaggcaaggatctactgtcatttgtatgcaatttcctgttaccttgaaaaaataaaaatgttaacaggaatgcagtgtgctcattctccctaaatagtaaatcccactgtatacaaaactgttctcttgttctgccttttaaaatgttcatgtagaaaattaatgaactataggaatagctctaggagaacaaatgtgctttctgtaaaaaggcagaccagggatgtaatgtttttaatgtttcagaagcctaactttttacacagtggttacatttcacatttcactaatgttgatatttggctgatggttgagcagtttctgaaatacacatttagtgtatggaaatacaagacagctaaagggctgtttggttagcatctcatcttgcattctgatcaattggcaagaaagggagatttcaaaattatatttcttgatggtatcttttcaattaatgtatctgtaaaagtttctttgtaaatactatgtgttctggtgtgtcttaaaattccaaacaaaatgatccctgcatttcctgaagatgtttaaacgtgagagtctggtaggcaaagcagtctgagaaagaaataggaaatgcagaaataggttttgtctggttgcatataatctttgctctttttaagctctgtgagctctgaaatatatttttgggttacttcagtgtgtttgacaagacagcttgatatttctatcaaacaaatgactttcatattgcaacaatctttgtaagaaccactcaaataaaagtctcttaaaaaggcc

SEQ ID NO: 9892 - protein, 71 aa, Homo sapiens [sequence omitted]

SEQ ID NO: 9893 - DNA, 2969 bp, Homo sapiens
gtgtgtgtgtatgtgtgctggtgaatgtgagtacagggaagcagcggccgccatttcagggagcttgtcgacgctgtcgcaggggtggatcctgagctgccgaagccgccgtcctgctctcccgcgtgggcttctctaattccattgttttttttagattctctcgggcctagccgtccttggaacccgatattcgggctgggcggttccgcggcctgggcctaggggcttaacagtagcaacagaagcggcggcggcggcagcagcagcagcagcagcagcaatctcttcccgaacacgagcaccacaggcgcccgaaggccggaacaggcgtttagagaaaatggcagacgatattgatattgaagcaatgcttgaggctccttacaagaagacttgcctaacgatatctcacctctactcccatgaattcacctttgattccagtgtgaactgtcaatcataaggatgagaacaagttgagcagtgccaacggccatgaagaacgtagcaaaaagaggaaaaaaagcaagagcagaagtcgtagtcatgaacgaaagagaagcaaaagtaaggaacggaagcgaagtagagacagagaaaggaaaaagagcaaaagccgtgaaagaaagcgaagtagaagcaaagagaggcgacggagccgctcaagaagtcgagatcgaagatttagaggccgctacagaagtccttactccggaccaaaatttaacagtgccatccgaggaaagattgggttgcctcatagcatcaaattaagcagacgacgttcccgaagcaaaagtccattcagaaaagacaagagccctgtgagagaacctattgataatttaactcctgaggaaagagatgcaaggacagtcttctgtatgcagctggcggcaagaattcgaccaagggatttggaagagtttttctctacagtaggaaaggttcgagatgtgaggatgatttctgacagaaattcaagacgttccaaaggaattgcttatgtggagttcgtcgatgttagctcagtgcctctagcaataggattaactggccaacgagttttaggcgtgccaatcatagtacaggcatcacaggcagaaaaaaacagagctgcagcaatggcaaacaatttacaaaagggaagtgctggacctatgaggctttatgtgggctcattacacttcaacataactgaagatatgcttcgtgggatctttgagccttttggaagaagacagggctttaccatgttggccaagttggtctcatactcctgacctcaggtgatctgcttcggcctcctaaagtgctgggattacagattgaaagtatccagctgatgatggacagtgaaactggtcgatccaagggatatggatttattacattttctgactcagaatgtgccaaaaaggctttggaacaacttaatggatttgaactagcaggaagaccaatgaaagttggtcatgttactgaacgtactgatgcttcgagtgctagttcatttttggacagtgatgaactggaaaggactggaattgatttgggaacaactggtcgtcttcagttaatggcaagacttgcagagggtacaggtttgcagattccgccagcagcacagcaagctctacagatgagtggctctttggcatttggtgctgtggcagaattctcttttgttatagatttgcaaacaagactttcccagcagactgaagcttcagctttagctgcagctgcctctgttcagccacttgcaacacaatgtttccaactctctaacatgtttaaccctcaaacagaagaagaagttggatgggataccgagattaaggatgatgtgattgaagaatgtaataaacatggaggagttattcatatttatgttgacaaaaattcagctcagggcaatgtgtatgtgaagtgcccatcaattgctgcagctattgctgctgtcaatgcattgcatggcaggtggtttgctggtaaaatgataacagcagcatatgtacctcttccaacttaccacaacctgtttcctgattctatgacagcaacacagctactggttccaagtagacgatgaaggaagatatagtcccttatgtatatagctttttttctttcttgagaattcatcttgagttatcttttatttagataaaaataaagaggcaaggatctactgtcatttgtatgcaatttcctgttaccttgaaaaaataaaaatgttaacaggaatgcagtgtgctcattctccctaaatagtaaatcccactgtatacaaaactgttctcttgttctgccttttaaaatgttcatgtagaaaattaatgaactataggaatagctctaggagaacaaatgtgctttctgtaaaaaggcagaccagggatgtaatgtttttaatgtttcagaagcctaactttttacacagtggttacatttcacatttcactaatgttgatatttggctgatggttgagcagtttctgaaatacacatttagtgtatggaaatacaagacagctaaagggctgtttggttagcatctcatcttgcattctgatcaattggcaagaaagggagatttcaaaattatatttcttgatggtatcttttcaattaatgtatctgtaaaagtttctttgtaaatactatgtgttctggtgtgtcttaaaattccaaacaaaatgatccctgcatttcctgaagatgtttaaacgtgagagtctggtaggcaaagcagtctgagaaagaaataggaaatgcagaaataggttttgtctggttgcatataatctttgctctttttaagctctgtgagctctgaaatatatttttgggttacttcagtgtgtttgacaagacagcttgatatttctatcaaacaaatgactttcatattgcaacaatctttgtaagaaccactcaaataaaagtctcttaaaaaggcc

SEQ ID NO: 9894 - protein, 249 aa, Homo sapiens
MMDSETGRSKGYGFITFSDSECAKKALEQLNGFELAGRPMKVGHVTERTDASSASSFLDSDELERTGIDLGTTGRLQLMARLAEGTGLQIPPAAQQALQMSGSLAFGAVAEFSFVIDLQTRLSQQTEASALAAAASVQPLATQCFQLSNMFNPQTEEEVGWDTEIKDDVIEECNKHGGVIHIYVDKNSAQGNVYVKCPSIAAAIAAVNALHGRWFAGKMITAAYVPLPTYHNLFPDSMTATQLLVPSRR

SEQ ID NO: 9895 - DNA, 2849 bp, Homo sapiens
gcgagagcccgtgctgagggctctgtgaggccccgtgtgtttgtgtgtgtgtatgtgtgctggtgaatgtgagtacagggaagcagcggccgccatttcagggagcttgtcgacgctgtcgcaggggtggatcctgagctgccgaagccgccgtcctgctctcccgcgtgggcttctctaattccattgttttttttagattctctcgggcctagccgtccttggaacccgatattcgggctgggcggttccgcggcctgggcctaggggcttaacagtagcaacagaagcggcggcggcggcagcagcagcagcagcagcagcaatctcttcccgaacacgagcaccacaggcgcccgaaggccggaacaggcgtttagagaaaatggcagacgatattgatattgaagcaatgcttgaggctccttacaagaaggatgagaacaagttgagcagtgccaacggccatgaagaacgtagcaaaaagaggaaaaaaagcaagagcagaagtcgtagtcatgaacgaaagagaagcaaaagtaaggaacggaagcgaagtagagacagagaaaggaaaaagagcaaaagccgtgaaagaaagcgaagtagaagcaaagagaggcgacggagccgctcaagaagtcgagatcgaagatttagaggccgctacagaagtccttactccggaccaaaatttaacagtgccatccgaggaaagattgggttgcctcatagcatcaaattaagcagacgacgttcccgaagcaaaagtccattcagaaaagacaagagccctgtgagagaacctattgataatttaactcctgaggaaagagatgcaaggacagtcttctgtatgcagctggcggcaagaattcgaccaagggatttggaagagtttttctctacagtaggaaaggttcgagatgtgaggatgatttctgacagaaattcaagacgttccaaaggaattgcttatgtggagttcgtcgatgttagctcagtgcctctagcaataggattaactggccaacgagttttaggcgtgccaatcatagtacaggcatcacaggcagaaaaaaacagagctgcagcaatggcaaacaatttacaaaagggaagtgctggacctatgaggctttatgtgggctcattacacttcaacataactgaagatatgcttcgtgggatctttgagccttttggaagaattgaaagtatccagctgatgatggacagtgaaactggtcgatccaagggatatggatttattacattttctgactcagaatgtgccaaaaaggctttggaacaacttaatggatttgaactagcaggaagaccaatgaaagttggtcatgttactgaacgtactgatgcttcgagtgctagttcatttttggacagtgatgaactggaaaggactggaattgatttgggaacaactggtcgtcttcagttaatggcaagacttgcagagggtacaggtttgcagattccgccagcagcacagcaagctctacagatgagtggctctttggcatttggtgctgtggcagaattctcttttgttatagatttgcaaacaagactttcccagcagactgaagcttcagctttagctgcagctgcctctgttcagccacttgcaacacaatgtttccaactctctaacatgtttaaccctcaaacagaagaagaagttggatgggataccgagattaaggatgatgtgattgaagaatgtaataaacatggaggagttattcatatttatgttgacaaaaattcagctcagggcaatgtgtatgtgaagtgcccatcaattgctgcagctattgctgctgtcaatgcattgcatggcaggtggtttgctggtaaaatgataacagcagcatatgtacctcttccaacttaccacaacctgtttcctgattctatgacagcaacacagctactggttccaagtagacgatgaaggaagatatagtcccttatgtatatagctttttttctttcttgagaattcatcttgagttatcttttatttagataaaaataaagaggcaaggatctactgtcatttgtatgcaatttcctgttaccttgaaaaaataaaaatgttaacaggaatgcagtgtgctcattctccctaaatagtaaatcccactgtatacaaaactgttctcttgttctgccttttaaaatgttcatgtagaaaattaatgaactataggaatagctctaggagaacaaatgtgctttctgtaaaaaggcagaccagggatgtaatgtttttaatgtttcagaagcctaactttttacacagtggttacatttcacatttcactaatgttgatatttggctgatggttgagcagtttctgaaatacacatttagtgtatggaaatacaagacagctaaagggctgtttggttagcatctcatcttgcattctgatcaattggcaagaaagggagatttcaaaattatatttcttgatggtatcttttcaattaatgtatctgtaaaagtttctttgtaaatactatgtgttctggtgtgtcttaaaattccaaacaaaatgatccctgcatttcctgaagatgtttaaacgtgagagtctggtaggcaaagcagtctgagaaagaaataggaaatgcagaaataggttttgtctggttgcatataatctttgctctttttaagctctgtgagctctgaaatatatttttgggttacttcagtgtgtttgacaagacagcttgatatttctatcaaacaaatgactttcatattgcaacaatctttgtaagaaccactcaaataaaagtctcttaaaaaggcc

SEQ ID NO: 9896 - protein, 530 aa, Homo sapiens; identical to SEQ ID NO: 1249

SEQ ID NO: 9897 - DNA, 2902 bp, Homo sapiens
gcgagagcccgtgctgagggctctgtgaggccccgtgtgtttgtgtgtgtgtatgtgtgctggtgaatgtgagtacagggaagcagcggccgccatttcagggagcttgtcgacgctgtcgcaggggtggatcctgagctgccgaagccgccgtcctgctctcccgcgtgggcttctctaattccattgttttttttagattctctcgggcctagccgtccttggaacccgatattcgggctgggcggttccgcggcctgggcctaggggcttaacagtagcaacagaagcggcggcggcggcagcagcagcagcagcagcagcaatctcttcccgaacacgagcaccacaggcgcccgaaggccggaacaggcgtttagagaaaatggcagacgatattgatattgaagcaatgcttgaggctccttacaagaaggatgagaacaagttgagcagtgccaacggccatgaagaacgtagcaaaaagaggaaaaaaagcaagagcagaagtcgtagtcatgaacgaaagagaagcaaaagtaaggaacggaagcgaagtagagacagagaaaggaaaaagagcaaaagccgtgaaagaaagcgaagtagaagcaaagagaggcgacggagccgctcaagaagtcgagatcgaagatttagaggccgctacagaagtccttactccggaccaaaatttaacagtgccatccgaggaaagattgggttgcctcatagcatcaaattaagcagacgacgttcccgaagcaaaagtccattcagaaaagacaagagccctgtgagagaacctattgataatttaactcctgaggaaagagatgcaaggacagtcttctgtatgcagctggcggcaagaattcgaccaagggatttggaagagtttttctctacagtaggaaaggttcgagatgtgaggatgatttctgacagaaattcaagacgttccaaaggaattgcttatgtggagttcgtcgatgttagctcagtgcctctagcaataggattaactggccaacgagttttaggcgtgccaatcatagtacaggcatcacaggcagaaaaaaacagagctgcagcaatggcaaacaatttacaaaagggaagtgctggacctatgaggctttatgtgggctcattacacttcaacataactgaagatatgcttcgtgggatctttgagccttttggaagaattgaaagtatccagctgatgatggacagtgaaactggtcgatccaagggatatggatttattacattttctgactcagaatgtgccaaaaaggctttggaacaacttaatggatttgaactagcaggaagaccaatgaaagttggtcatgttactgaacgtactgatgcttcgagtgctagttcatttttggacagtgatgaactggaaaggactggaattgatttgggaacaactggtcgtcttcagttaatggcaagacttgcagagggtacaggtttgcagattccgccagcagcacagcaagctctacagatgagtggctctttggcatttggtgctgtggcagaattctcttttgttatagatttgcaaacaagactttcccagcagactgaagctttgtttgttattatgttttggaatgaaatttggtcagataatatgattacgcttcagctttagctgcagctgcctctgttcagccacttgcaacacaatgtttccaactctctaacatgtttaaccctcaaacagaagaagaagttggatgggataccgagattaaggatgatgtgattgaagaatgtaataaacatggaggagttattcatatttatgttgacaaaaattcagctcagggcaatgtgtatgtgaagtgcccatcaattgctgcagctattgctgctgtcaatgcattgcatggcaggtggtttgctggtaaaatgataacagcagcatatgtacctcttccaacttaccacaacctgtttcctgattctatgacagcaacacagctactggttccaagtagacgatgaaggaagatatagtcccttatgtatatagctttttttctttcttgagaattcatcttgagttatcttttatttagataaaaataaagaggcaaggatctactgtcatttgtatgcaatttcctgttaccttgaaaaaataaaaatgttaacaggaatgcagtgtgctcattctccctaaatagtaaatcccactgtatacaaaactgttctcttgttctgccttttaaaatgttcatgtagaaaattaatgaactataggaatagctctaggagaacaaatgtgctttctgtaaaaaggcagaccagggatgtaatgtttttaatgtttcagaagcctaactttttacacagtggttacatttcacatttcactaatgttgatatttggctgatggttgagcagtttctgaaatacacatttagtgtatggaaatacaagacagctaaagggctgtttggttagcatctcatcttgcattctgatcaattggcaagaaagggagatttcaaaattatatttcttgatggtatcttttcaattaatgtatctgtaaaagtttctttgtaaatactatgtgttctggtgtgtcttaaaattccaaacaaaatgatccctgcatttcctgaagatgtttaaacgtgagagtctggtaggcaaagcagtctgagaaagaaataggaaatgcagaaataggttttgtctggttgcatataatctttgctctttttaagctctgtgagctctgaaatatatttttgggttacttcagtgtgtttgacaagacagcttgatatttctatcaaacaaatgactttcatattgcaacaatctttgtaagaaccactcaaataaaagtctcttaaaaaggcc

SEQ ID NO: 9898 - protein, 429 aa, Homo sapiens
MADDIDIEAMLEAPYKKDENKLSSANGHEERSKKRKKSKSRSRSHERKRSKSKERKRSRDRERKKSKSRERKRSRSKERRRSRSRSRDRRFRGRYRSPYSGPKFNSAIRGKIGLPHSIKLSRRRSRSKSPFRKDKSPVREPIDNLTPEERDARTVFCMQLAARIRPRDLEEFFSTVGKVRDVRMISDRNSRRSKGIAYVEFVDVSSVPLAIGLTGQRVLGVPIIVQASQAEKNRAAAMANNLQKGSAGPMRLYVGSLHFNITEDMLRGIFEPFGRIESIQLMMDSETGRSKGYGFITFSDSECAKKALEQLNGFELAGRPMKVGHVTERTDASSASSFLDSDELERTGIDLGTTGRLQLMARLAEGTGLQIPPAAQQALQMSGSLAFGAVAEFSFVIDLQTRLSQQTEALFVIMFWNEIWSDNMITLQL

SEQ ID NO: 9899 - DNA, 2948 bp, Homo sapiens
aaatttggagcttggggcagcttctcgcgagagcccgtgctgagggctctgtgaggccccgtgtgtttgtgtgtgtgtatgtgtgctggtgaatgtgagtacagggaagcagcggccgccatttcagggagcttgtcgacgctgtcgcaggggtggatcctgagctgccgaagccgccgtcctgctctcccgcgtgggcttctctaattccattgttttttttagattctctcgggcctagccgtccttggaacccgatattcgggctgggcggttccgcggcctgggcctaggggcttaacagtagcaacagaagcggcggcggcggcagcagcagcagcagcagcagcaatctcttcccgaacacgagcaccacaggcgcccgaaggccggaacaggcgtttagagaaaatggcagacgatattgatattgaagcaatgcttgaggctccttacaagaagacttgcctaacgatatctcacctctactcccatgaattcacctttgattccagtgtgaactgtcaatcataaggatgagaacaagttgagcagtgccaacggccatgaagaacgtagcaaaaagaggaaaaaaagcaagagcagaagtcgtagtcatgaacgaaagagaagcaaaagtaaggaacggaagcgaagtagagacagagaaaggaaaaagagcaaaagccgtgaaagaaagcgaagtagaagcaaagagaggcgacggagccgctcaagaagtcgagatcgaagatttagaggccgctacagaagtccttactccggaccaaaatttaacagtgccatccgaggaaagattgggttgcctcatagcatcaaattaagcagacgacgttcccgaagcaaaagtccattcagaaaagacaagagccctgtgagagaacctattgataatttaactcctgaggaaagagatgcaaggacagtcttctgtatgcagctggcggcaagaattcgaccaagggatttggaagagtttttctctacagtaggaaaggttcgagatgtgaggatgatttctgacagaaattcaagacgttccaaaggaattgcttatgtggagttcgtcgatgttagctcagtgcctctagcaataggattaactggccaacgagttttaggcgtgccaatcatagtacaggcatcacaggcagaaaaaaacagagctgcagcaatggcaaacaatttacaaaagggaagtgctggacctatgaggctttatgtgggctcattacacttcaacataactgaagatatgcttcgtgggatctttgagccttttggaagaattgaaagtatccagctgatgatggacagtgaaactggtcgatccaagggatatggatttattacattttctgactcagaatgtgccaaaaaggctttggaacaacttaatggatttgaactagcaggaagaccaatgaaagttggtcatgttactgaacgtactgatgcttcgagtgctagttcatttttggacagtgatgaactggaaaggactggaattgatttgggaacaactggtcgtcttcagttaatggcaagacttgcagagggtacaggtttgcagattccgccagcagcacagcaagctctacagatgagtggctctttggcatttggtgctgtggcagaattctcttttgttatagatttgcaaacaagactttcccagcagactgaagcttcagctttagctgcagctgcctctgttcagccacttgcaacacaatgtttccaactctctaacatgtttaaccctcaaacagaagaagaagttggatgggataccgagattaaggatgatgtgattgaagaatgtaataaacatggaggagttattcatatttatgttgacaaaaattcagctcagggcaatgtgtatgtgaagtgcccatcaattgctgcagctattgctgctgtcaatgcattgcatggcaggtggtttgctggtaaaatgataacagcagcatatgtacctcttccaacttaccacaacctgtttcctgattctatgacagcaacacagctactggttccaagtagacgatgaaggaagatatagtcccttatgtatatagctttttttctttcttgagaattcatcttgagttatcttttatttagataaaaataaagaggcaaggatctactgtcatttgtatgcaatttcctgttaccttgaaaaaataaaaatgttaacaggaatgcagtgtgctcattctccctaaatagtaaatcccactgtatacaaaactgttctcttgttctgccttttaaaatgttcatgtagaaaattaatgaactataggaatagctctaggagaacaaatgtgctttctgtaaaaaggcagaccagggatgtaatgtttttaatgtttcagaagcctaactttttacacagtggttacatttcacatttcactaatgttgatatttggctgatggttgagcagtttctgaaatacacatttagtgtatggaaatacaagacagctaaagggctgtttggttagcatctcatcttgcattctgatcaattggcaagaaagggagatttcaaaattatatttcttgatggtatcttttcaattaatgtatctgtaaaagtttctttgtaaatactatgtgttctggtgtgtcttaaaattccaaacaaaatgatccctgcatttcctgaagatgtttaaacgtgagagtctggtaggcaaagcagtctgagaaagaaataggaaatgcagaaataggttttgtctggttgcatataatctttgctctttttaagctctgtgagctctgaaatatatttttgggttacttcagtgtgtttgacaagacagcttgatatttctatcaaacaaatgactttcatattgcaacaatctttgtaagaaccactcaaataaaagtctcttaaaaaggcc

SEQ ID NO: 9900 - protein, 373 aa, Homo sapiens; identical to SEQ ID NO: 9876

SEQ ID NO: 9901 - DNA, 4681 bp, Homo sapiens
aaatttggagcttggggcagcttctcgcgagagcccgtgctgagggctctgtgaggccccgtgtgtttgtgtgtgtgtatgtgtgctggtgaatgtgagtacagggaagcagcggccgccatttcagggagcttgtcgacgctgtcgcaggggtggatcctgagctgccgaagccgccgtcctgctctcccgcgtgggcttctctaattccattgttttttttagattctctcgggcctagccgtccttggaacccgatattcgggctgggcggttccgcggcctgggcctaggggcttaacagtagcaacagaagcggcggcggcggcagcagcagcagcagcagcagcaatctcttcccgaacacgagcaccacaggcgcccgaaggccggaacaggcgtttagagaaaatggcagacgatattgatattgaagcaatgcttgaggctccttacaagaaggtgagaaaaaacatgtcggtgaggtttatatatttcttaatttagcattattcacgaaactactgctgaaatgtaaactaacctccccggagccctcttgatttatcttatcagagatgcattacgtgtaacttacaaaagtaaatatatgctattgatgtaataatattgtgcagtagtttcacttcagcgtgatgaataaatgcccatctatctctctttgtagacttgcctaacgatatctcacctctactcccatgaattcacctttgattccagtgtgaactgtcaatcataaggtagtaattgagtgacttatcgctgtaccgtggtcccctaggtaaaatgactcaactaagaattaccacctccagtttggtatagcaaaaaggtgaatgtagtggtttgggaaaaagcaggggtccaagaataacaaagcatgaccagtctgtggcaagttaaatcttctaacagtcttataagaagaaatgggtgagattttaaaatttatgtatctatgtaagactggtgatagtaaatcttaaaacagtccagtggcaatctgctgctcagttaataattactaaaattcttggatccctgaatagaaattaaaaaaaaaaaatacaagaggcagtagagtcaatacaagcttaatacaagcttagagtaaatacaagcttagagtcacttgatgactgttttactgttctccatattgtttttatttttaattaggccctaccatagtatttcacactaaaaacaaaggaattatattggctaatatagtctttgactcatttcggtatctcagtaaaagtaaactgtcttttcattgtttcaccagttggtggtgaaaatagcagtatgcatgcattatcactggtgtcacaaactgtaagctttgtaagttagcactttactcctatagctgatgtaatcaaactttaaaataaacatttcactaaaccttttaaaaataatacatttgttttggattgtatagcacgaccatgtggtaccaatttggatgaattcttgatagatttaaatagtgtatgtaattttgtaatgcttagactcttgaagagctactttctgttttaatgttaagattcttgtgtcttagttttttttaacatggatgtaattccatgtaaacaggtatggaagtaggaaatgtttaggctggacttggtggattattaattgactttcttgggttcttgggagtcaacattactaaagcagtgtgaatccctgtttgcttcagggcgagatgtgtgacagaggtggcatcaagctcttacagtcccaaccctccaacggaaatgggcgaagatctcaggaatggcatcggtcacaggaaatcgatagtggctggctgctagcatggccacttggggcttaggcagaaatagagccatggtactgaccaaagggaccatagcacatggaataaaactcaaaacaggacttcatgttttatggaaattatatttaaccacttcaacattgtaaatctggataacttttaatatctaaactatataagaaagtaaaatttaacatgttaatatggaaaatttttttatttttgtatcttgatgacttaaatgtaagcaacaaagtggttaaacacatacccatctaaatttttttatagccttccatgttaaactataagtaaataattagttttaaaattgttttgtattttcttattcctgttccctttaccctttgacaacttgaaatgttaccacttcgtcctcatgatgttcttctatcaaccctgcttaggatgagaacaagttgagcagtgccaacggccatgaagaacgtagcaaaaagaggaaaaaaagcaagagcagaagtcgtagtcatgaacgaaagagaagcaaaagtaaggaacggaagcgaagtagagacagagaaaggaaaaagagcaaaagccgtgaaagaaagcgaagtagaagcaaagagaggcgacggagccgctcaagaagtcgagatcgaagatttagaggccgctacagaagtccttactccggaccaaaatttaacagtgccatccgaggaaagattgggttgcctcatagcatcaaattaagcagacgacgttcccgaagcaaaagtccattcagaaaagacaagagccctgtgagagaacctattgataatttaactcctgaggaaagagatgcaaggacagtcttctgtatgcagctggcggcaagaattcgaccaagggatttggaagagtttttctctacagtaggaaaggttcgagatgtgaggatgatttctgacagaaattcaagacgttccaaaggaattgcttatgtggagttcgtcgatgttagctcagtgcctctagcaataggattaactggccaacgagttttaggcgtgccaatcatagtacaggcatcacaggcagaaaaaaacagagctgcagcaatggcaaacaatttacaaaagggaagtgctggacctatgaggctttatgtgggctcattacacttcaacataactgaagatatgcttcgtgggatctttgagccttttggaagaattgaaagtatccagctgatgatggacagtgaaactggtcgatccaagggatatggatttattacattttctgactcagaatgtgccaaaaaggctttggaacaacttaatggatttgaactagcaggaagaccaatgaaagttggtcatgttactgaacgtactgatgcttcgagtgctagttcatttttggacagtgatgaactggaaaggactggaattgatttgggaacaactggtcgtcttcagttaatggcaagacttgcagagggtacaggtttgcagattccgccagcagcacagcaagctctacagatgagtggctctttggcatttggtgctgtggcagaattctcttttgttatagatttgcaaacaagactttcccagcagactgaagcttcagctttagctgcagctgcctctgttcagccacttgcaacacaatgtttccaactctctaacatgtttaaccctcaaacagaagaagaagttggatgggataccgagattaaggatgatgtgattgaagaatgtaataaacatggaggagttattcatatttatgttgacaaaaattcagctcagggcaatgtgtatgtgaagtgcccatcaattgctgcagctattgctgctgtcaatgcattgcatggcaggtggtttgctggtaaaatgataacagcagcatatgtacctcttccaacttaccacaacctgtttcctgattctatgacagcaacacagctactggttccaagtagacgatgaaggaagatatagtcccttatgtatatagctttttttctttcttgagaattcatcttgagttatcttttatttagataaaaataaagaggcaaggatctactgtcatttgtatgcaatttcctgttaccttgaaaaaataaaaatgttaacaggaatgcagtgtgctcattctccctaaatagtaaatcccactgtatacaaaactgttctcttgttctgccttttaaaatgttcatgtagaaaattaatgaactataggaatagctctaggagaacaaatgtgctttctgtaaaaaggcagaccagggatgtaatgtttttaatgtttcagaagcctaactttttacacagtggttacatttcacatttcactaatgttgatatttggctgatggttgagcagtttctgaaatacacatttagtgtatggaaatacaagacagctaaagggctgtttggttagcatctcatcttgcattctgatcaattggcaagaaagggagatttcaaaattatatttcttgatggtatcttttcaattaatgtatctgtaaaagtttctttgtaaatactatgtgttctggtgtgtcttaaaattccaaacaaaatgatccctgcatttcctgaagatgtttaaacgtgagagtctggtaggcaaagcagtctgagaaagaaataggaaatgcagaaataggttttgtctggttgcatataatctttgctctttttaagctctgtgagctctgaaatatatttttgggttacttcagtgtgtttgacaagacagcttgatatttctatcaaacaaatgactttcatattgcaacaatctttgtaagaaccactcaaataaaagtctcttaaaaaggcc

SEQ ID NO: 9902 - protein, 373 aa, Homo sapiens; identical to SEQ ID NO: 9876

SEQ ID NO: 9903 - DNA, 659 bp, Homo sapiens
gctgggattacaggcatgagtcaccgcgcccggcctcattgaaaatttatttttcaataccagactgcagtgttctttggggcagagacgttctgtcaatgtgctttttttccaaagtattttttttaattcatagaatatttaaattttttgatacatttgtaaatatatagtttgttagtttcaatagtatttaagagtccttaatactttcttacagagaagaagaagttggatgggataccgagattaaggatgatgtgattgaagaatgtaataaacatggaggagttattcatatttatgttgacaaaaattcagctcagggcaatgtgtatgtgaagtgcccatcaattgctgcagctattgctgctgtcaatgcattgcatggcaggtggtttgctggtaaaatgataacagcagcatatgtacctcttccaacttaccacaacctgtttcctgattctatgacagcaacacagctactggttccaagtagacgatgaaggaagatatagtcccttatgtatatagctttttttctttcttgagaattcatcttgagttatcttttatttagataaaaataaagaggcaaggatctactgtcatttgtatgcaatttcctgttaccttgaaaaaataaaaatgttaacagg

SEQ ID NO: 9904 - protein, 31 aa, Homo sapiens
MITAAYVPLPTYHNLFPDSMTATQLLVPSRR

SEQ ID NO: 9905 - DNA, 1288 bp, Homo sapiens
atgaaatttggtcagataatatgattacggtgagttctgtaacagctactggtaatatttttgtaaatcacgtgaaagcattggagcaactgtcttggaaaatgctctttaaacttcaaaccccagtatgttttggtagtagtggatattacacatatatgctgctcttttcagtgttcttttattgtgcgaaaacatttttaaaacatttgatttattaataggatttatttttaataggattgttaataggatttatttttctaggacattgtctttaaacacttggatgattttatatgtcttaattctttaataatttgtagatttaaaaaacttcgtgggcagaaagcgaagaaataggaaaggatatagatttatttggcatttcaaaggattttgttttattatcccctcttatttgggtataaactcaaatctattttatccttcatctgtttggattgatgtgtattgagattttgtctaattgaactgattttgataacacataaagtttaatttccctgttaaaataggactcccaaatttctgaatgtctgtttcaagtattaggttacctcagttttctggcacctaaaagctactgataacatacattagtagcaatattaaataaggtaaaataactccagtgacatcctagttacatgcttggggtgggtttttggtttcgttttaaagtatttatgagggatactttcatgcattttccatgaaactaatttttctctttctttttttagcttcagctttagctgcagctgcctctgttcagccacttgcaacacaatgtttccaactctctaacatgtttaaccctcaaacagaagaagaagttggatgggataccgagattaaggatgatgtgattgaagaatgtaataaacatggaggagttattcatatttatgttgacaaaaattcagctcagggcaatgtgtatgtgaagtgcccatcaattgctgcagctattgctgctgtcaatgcattgcatggcaggtggtttgctggtaaaatgataacagcagcatatgtacctcttccaacttaccacaacctgtttcctgattctatgacagcaacacagctactggttccaagtagacgatgaaggaagatatagtcccttatgtatatagctttttttctttcttgagaattcatcttgagttatcttttatttagataaaaataaagaggcaaggatctactgtcatttgtatgcaatttcctgttaccttgaaaaaataaaaatgttaacagg

SEQ ID NO: 9906 - protein, 132 aa, Homo sapiens [sequence omitted]

SEQ ID NO: 9907 - DNA, 2379 bp, Homo sapiens
attatgagaaagatatgtcatgttccatcacagtcaagaattaaattttttcacaaacaagatgcttctaatcagtgctgttttgttaagagatttttaaaagattttcctagatttactgtgttctgcattgatctagcttgaacgtgaatgtttgtatagtacgttttcttaatattttttagtattcatagtatataatcatactaaacttgagaaactggaagaatcaagtcttcctcagttctgtttagactttctagttttttttaaggatacttccatatcttctgtaagctacacagtgagcttcatttttgcacagttataatacactctcgaatctttaacttttttccagcagaatttgacatgttatattaaaattttgttttatttaaaataaaactttatgaaagaaaaaacttatatgttacagagaagctaaagcacctgtaatgctaccagaaagttatcatttatgatatatttcatgcacagccctaatttctcggtgtaatatttctgatactttaagtgatcgtttattttaattaccataatttctaatgcactgttttatccttagctttgtttgttattatgttttggaatgaaatttggtcagataatatgattacggtgagttctgtaacagctactggtaatatttttgtaaatcacgtgaaagcattggagcaactgtcttggaaaatgctctttaaacttcaaaccccagtatgttttggtagtagtggatattacacatatatgctgctcttttcagtgttcttttattgtgcgaaaacatttttaaaacatttgatttattaataggatttatttttaataggattgttaataggatttatttttctaggacattgtctttaaacacttggatgattttatatgtcttaattctttaataatttgtagatttaaaaaacttcgtgggcagaaagcgaagaaataggaaaggatatagatttatttggcatttcaaaggattttgttttattatcccctcttatttgggtataaactcaaatctattttatccttcatctgtttggattgatgtgtattgagattttgtctaattgaactgattttgataacacataaagtttaatttccctgttaaaataggactcccaaatttctgaatgtctgtttcaagtattaggttacctcagttttctggcacctaaaagctactgataacatacattagtagcaatattaaataaggtaaaataactccagtgacatcctagttacatgcttggggtgggtttttggtttcgttttaaagtatttatgagggatactttcatgcattttccatgaaactaatttttctctttctttttttagcttcagctttagctgcagctgcctctgttcagccacttgcaacacaatgtttccaactctctaacatgtttaaccctcaaacagaagaagaagttggatgggataccgagattaaggatgatgtgattgaagaatgtaataaacatggaggagttattcatatttatgttgacaaaaattcagctcaggtattttcatctttttttataaatgatgttaggttgttcgtctctaccttaatcttcgcacattatgtggtgcatgttatggttaaccgtcttccattatagtttttgtgtgtgtgtgcctgaaagtagctttaatatagtggctaaataaaccctccaaaataaaagaaaatcagtaacaatttgatcagggtatgagaggatttctagtaatgctcaaagcttgccatgaaatcttggcatcttgattcattcttaggctgcatacaaatcgtagagaaaagataaaacggcaaatttgagagtagaagtcattttttaataaaattctagtatacctattagccagtggaaccattatggtaaaccagtttgtggttatagagcactaagtttctacaggcaacttgaataaacataacttgggtccattttgcatacagcaacatctttaccttttttttcattttttctgtagggcaatgtgtatgtgaagtgcccatcaattgctgcagctattgctgctgtcaatgcattgcatggcaggtggtttgctggtaaaatgataacagcagcatatgtacctcttccaacttaccacaacctgtttcctgattctatgacagcaacacagctactggttccaagtagacgatgaaggaagatatagtcccttatgtatatagctttttttctttcttgagaattcatcttgagttatcttttatttagataaaaataaagaggcaaggatctactgtcatttgtatgcaatttcctgttaccttgaaaaaataaaaatgttaacagg

SEQ ID NO: 9908 - protein, 106 aa, Homo sapiens; identical to SEQ ID NO: 9868

SEQ ID NO: 9909 - DNA, 831 bp, Homo sapiens
gggatttaagtgaaccacctcccttggcctcccagagtgctagctaagttacaggcgtcaaccaccacactcggccctccttgcaatttattttagtgaagtgatcatgatattaatgacccaggaaacttcgtttctctgctctcaacatagtaggaactttaagactattcttttacaggtacaggtttgcagattccgccagcagcacagcaagctctacagatgagtggctctttggcatttggtgctgtggcagaattctcttttgttatagatttgcaaacaagactttcccagcagactgaagcttcagctttagctgcagctgcctctgttcagccacttgcaacacaatgtttccaactctctaacatgtttaaccctcaaacagaagaagaagttggatgggataccgagattaaggatgatgtgattgaagaatgtaataaacatggaggagttattcatatttatgttgacaaaaattcagctcagggcaatgtgtatgtgaagtgcccatcaattgctgcagctattgctgctgtcaatgcattgcatggcaggtggtttgctggtaaaatgataacagcagcatatgtacctcttccaacttaccacaacctgtttcctgattctatgacagcaacacagctactggttccaagtagacgatgaaggaagatatagtcccttatgtatatagctttttttctttcttgagaattcatcttgagttatcttttatttagataaaaataaagaggcaaggatctactgtcatttgtatgcaatttcctgttaccttgaaaaaataaaaatgttaacagg

SEQ ID NO: 9910 - protein, 150 aa, Homo sapiens; identical to SEQ ID NO: 9870

SEQ ID NO: 9911 - DNA, 2339 bp, Homo sapiens
attctattgtaagtttgttttattaatttattttgtggattacagtaatgcttttgttggcctgttgtatgacaaactatttaaaggttcacattttgatttgtatttgccaacaagcccttttgcttgttaaagctatagctaactctcaggagataattgcagttctactcttagaggatggtgtctttcaaataatgtcttgtctgctgattttcagtaatgttaatataaggcaaaagggatattgtttactatacgtagcaatttttttagacagagtcttactctgtcgcccaggctggagtaccagtggcgggatcttggctcactgcaacctccgcttcccgggtttgagcaattctcctgccttagcctcccgagtagctgggactacaggcgcacggtactatgcccggctaatttttgtatttttattagggacggggtttcactacattggccagactggtcttgaactcctgaccttgtgatctgcctgcctcggcctaccaaagtgctgagattacaggatttttttttttttttaagtatgattatgtaccattgtatcatagtaaaactagccaaagaaatttatgaaaggatgaaaaaatgattctggccataaaaggtagtatattttggtgggttcttaagccagcatgataatggcgagtttttttcttctcaggaggaaaaaaagcaagagcagaagtcgtagtcatgaacgaaagagaagcaaaagtaaggaacggaagcgaagtagagacagagaaaggaaaaagagcaaaagccgtgaaagaaagcgaagtagaagcaaagagaggcgacggagccgctcaagaagtcgagatcgaagatttagaggccgctacagaagtccttactccggaccaaaatttaacagtgccatccgaggaaagattgggttgcctcatagcatcaaattaagcagacgacgttcccgaagcaaaagtccattcagaaaagacaagagccctgtgagagaacctattgataatttaactcctgaggaaagagatgcaaggacagtcttctgtatgcagctggcggcaagaattcgaccaagggatttggaagagtttttctctacagtaggaaaggttcgagatgtgaggatgatttctgacagaaattcaagacgttccaaaggaattgcttatgtggagttcgtcgatgttagctcagtgcctctagcaataggattaactggccaacgagttttaggcgtgccaatcatagtacaggcatcacaggcagaaaaaaacagagctgcagcaatggcaaacaatttacaaaagggaagtgctggacctatgaggctttatgtgggctcattacacttcaacataactgaagatatgcttcgtgggatctttgagccttttggaagaattgaaagtatccagctgatgatggacagtgaaactggtcgatccaagggatatggatttattacattttctgactcagaatgtgccaaaaaggctttggaacaacttaatggatttgaactagcaggaagaccaatgaaagttggtcatgttactgaacgtactgatgcttcgagtgctagttcatttttggacagtgatgaactggaaaggactggaattgatttgggaacaactggtcgtcttcagttaatggcaagacttgcagagggtacaggtttgcagattccgccagcagcacagcaagctctacagatgagtggctctttggcatttggtgctgtggcagaattctcttttgttatagatttgcaaacaagactttcccagcagactgaagcttcagctttagctgcagctgcctctgttcagccacttgcaacacaatgtttccaactctctaacatgtttaaccctcaaacagaagaagaagttggatgggataccgagattaaggatgatgtgattgaagaatgtaataaacatggaggagttattcatatttatgttgacaaaaattcagctcagggcaatgtgtatgtgaagtgcccatcaattgctgcagctattgctgctgtcaatgcattgcatggcaggtggtttgctggtaaaatgataacagcagcatatgtacctcttccaacttaccacaacctgtttcctgattctatgacagcaacacagctactggttccaagtagacgatgaaggaagatatagtcccttatgtatatagctttttttctttcttgagaattcatcttgagttatcttttatttagataaaaataaagaggcaaggatctactgtcatttgtatgcaatttcctgttaccttgaaaaaataaaaatgttaacagg

SEQ ID NO: 9912 - protein, 506 aa, Homo sapiens; identical to SEQ ID NO: 9872

SEQ ID NO: 9913 - DNA, 523 bp, Homo sapiens
ggtgaatgtgagtacagggaagcagcggccgccatttcagggagcttgtcgacgctgtcgcaggggtggatcctgagctgccgaagccgccgtcctgctctcccgcgtgggcttctctaattccattgttttttttagattctctcgggcctagccgtccttggaacccgatattcgggctgggcggttccgcggcctgggcctagggtgcccatcaattgctgcagctattgctgctgtcaatgcattgcatggcaggtggtttgctggtaaaatgataacagcagcatatgtacctcttccaacttaccacaacctgtttcctgattctatgacagcaacacagctactggttccaagtagacgatgaaggaagatatagtcccttatgtatatagctttttttctttcttgagaattcatcttgagttatcttttatttagataaaaataaagaggcaaggatctactgtcatttgtatgcaatttcctgttaccttgaaaaaataaaaatgttaacagg

SEQ ID NO: 9914 - protein, 31 aa, Homo sapiens; identical to SEQ ID NO: 9904

SEQ ID NO: 9915 - DNA, 2161 bp, Homo sapiens
gtgtgtgtgtatgtgtgctggtgaatgtgagtacagggaagcagcggccgccatttcagggagcttgtcgacgctgtcgcaggggtggatcctgagctgccgaagccgccgtcctgctctcccgcgtgggcttctctaattccattgttttttttagattctctcgggcctagccgtccttggaacccgatattcgggctgggcggttccgcggcctgggcctaggggcttaacagtagcaacagaagcggcggcggcggcagcagcagcagcagcagcagcaatctcttcccgaacacgagcaccacaggcgcccgaaggccggaacaggcgtttagagaaaatggcagacgatattgatattgaagcaatgcttgaggctccttacaagaaggatgagaacaagttgagcagtgccaacggccatgaagaacgtagcaaaaaacaaactttctgcctccttggaaagctctacatctccttgtgattggagtgtgggtttcaagattccagaaggaggaaaaaaagcaagagcagaagtcgtagtcatgaacgaaagagaagcaaaagtaaggaacggaagcgaagtagagacagagaaaggaaaaagagcaaaagccgtgaaagaaagcgaagtagaagcaaagagaggcgacggagccgctcaagaagtcgagatcgaagatttagaggccgctacagaagtccttactccggaccaaaatttaacagtgccatccgaggaaagattgggttgcctcatagcatcaaattaagcagacgacgttcccgaagcaaaagtccattcagaaaagacaagagccctgtgagagaacctattgataatttaactcctgaggaaagagatgcaaggacagtcttctgtatgcagctggcggcaagaattcgaccaagggatttggaagagtttttctctacagtaggaaaggttcgagatgtgaggatgatttctgacagaaattcaagacgttccaaaggaattgcttatgtggagttcgtcgatgttagctcagtgcctctagcaataggattaactggccaacgagttttaggcgtgccaatcatagtacaggcatcacaggcagaaaaaaacagagctgcagcaatggcaaacaatttacaaaagggaagtgctggacctatgaggctttatgtgggctcattacacttcaacataactgaagatatgcttcgtgggatctttgagccttttggaagaattgaaagtatccagctgatgatggacagtgaaactggtcgatccaagggatatggatttattacattttctgactcagaatgtgccaaaaaggctttggaacaacttaatggatttgaactagcaggaagaccaatgaaagttggtcatgttactgaacgtactgatgcttcgagtgctagttcatttttggacagtgatgaactggaaaggactggaattgatttgggaacaactggtcgtcttcagttaatggcaagacttgcagagggtacaggtttgcagattccgccagcagcacagcaagctctacagatgagtggctctttggcatttggtgctgtggcagaattctcttttgttatagatttgcaaacaagactttcccagcagactgaagcttcagctttagctgcagctgcctctgttcagccacttgcaacacaatgtttccaactctctaacatgtttaaccctcaaacagaagaagaagttggatgggataccgagattaaggatgatgtgattgaagaatgtaataaacatggaggagttattcatatttatgttgacaaaaattcagctcagggcaatgtgtatgtgaagtgcccatcaattgctgcagctattgctgctgtcaatgcattgcatggcaggtggtttgctggtaaaatgataacagcagcatatgtacctcttccaacttaccacaacctgtttcctgattctatgacagcaacacagctactggttccaagtagacgatgaaggaagatatagtcccttatgtatatagctttttttctttcttgagaattcatcttgagttatcttttatttagataaaaataaagaggcaaggatctactgtcatttgtatgcaatttcctgttaccttgaaaaaataaaaatgttaacagg

SEQ ID NO: 9916 - protein, 373 aa, Homo sapiens; identical to SEQ ID NO: 9876

SEQ ID NO: 9917 - DNA, 2131 bp, Homo sapiens
gcgagagcccgtgctgagggctctgtgaggccccgtgtgtttgtgtgtgtgtatgtgtgctggtgaatgtgagtacagggaagcagcggccgccatttcagggagcttgtcgacgctgtcgcaggggtggatcctgagctgccgaagccgccgtcctgctctcccgcgtgggcttctctaattccattgttttttttagattctctcgggcctagccgtccttggaacccgatattcgggctgggcggttccgcggcctgggcctaggggcttaacagtagcaacagaagcggcggcggcggcagcagcagcagcagcagcagcaatctcttcccgaacacgagcaccacaggcgcccgaaggccggaacaggcgtttagagaaaatggcagacgatattgatattgaagcaatgcttgaggctccttacaagaaggatgagaacaagttgagcagtgccaacggccatgaagaacgtagcaaaaagaggaaaaaaagcaagagcagaagtcgtagtcatgaacgaaagagaagcaaaagtaaggaacggaagcgaagtagagacagagaaaggaaaaagagcaaaagccgtgaaagaaagcgaagtagaagcaaagagaggcgacggagccgctcaagaagtcgagatcgaagatttagaggccgctacagaagtccttactccggaccaaaatttaacagtgccatccgaggaaagattgggttgcctcatagcatcaaattaagcagacgacgttcccgaagcaaaagtccattcagaaaagacaagagccctgtgagagaacctattgataatttaactcctgaggaaagagatgcaaggacagtcttctgtatgcagctggcggcaagaattcgaccaagggatttggaagagtttttctctacagtaggaaaggttcgagatgtgaggatgatttctgacagaaattcaagacgttccaaaggaattgcttatgtggagttcgtcgatgttagctcagtgcctctagcaataggattaactggccaacgagttttaggcgtgccaatcatagtacaggcatcacaggcagaaaaaaacagagctgcagcaatggcaaacaatttacaaaagggaagtgctggacctatgaggctttatgtgggctcattacacttcaacataactgaagatatgcttcgtgggatctttgagccttttggaagaattgaaagtatccagctgatgatggacagtgaaactggtcgatccaagggatatggatttattacattttctgactcagaatgtgccaaaaaggctttggaacaacttaatggatttgaactagcaggaagaccaatgaaagttggtcatgttactgaacgtactgatgcttcgagtgctagttcatttttggacagtgatgaactggaaaggactggaattgatttgggaacaactggtcgtcttcagttaatggcaagacttgcagagggtacaggtttgcagattccgccagcagcacagcaagctctacagatgagtggctctttggcatttggtgctgtggcagaattctcttttgttatagatttgcaaacaagactttcccagcagactgaagcttcagctttagctgcagctgcctctgttcagccacttgcaacacaatgtttccaactctctaacatgtttaaccctcaaacagaagaagaagttggatgggataccgagattaaggatgatgtgattgaagaatgtaataaacatggaggagttattcatatttatgttgacaaaaattcagctcagggcaatgtgtatgtgaagtgcccatcaattgctgcagctattgctgctgtcaatgcattgcatggcaggtggtttgctggtaaaatgataacagcagcatatgtacctcttccaacttaccacaacctgtttcctgattctatgacagcaacacagctactggttccaagtagacgatgaaggaagatatagtcccttatgtatatagctttttttctttcttgagaattcatcttgagttatcttttatttagataaaaataaagaggcaaggatctactgtcatttgtatgcaatttcctgttaccttgaaaaaataaaaatgttaacagg

SEQ ID NO: 9918 - protein, 530 aa, Homo sapiens; identical to SEQ ID NO: 1249

SEQ ID NO: 9919 - DNA, 2230 bp, Homo sapiens
aaatttggagcttggggcagcttctcgcgagagcccgtgctgagggctctgtgaggccccgtgtgtttgtgtgtgtgtatgtgtgctggtgaatgtgagtacagggaagcagcggccgccatttcagggagcttgtcgacgctgtcgcaggggtggatcctgagctgccgaagccgccgtcctgctctcccgcgtgggcttctctaattccattgttttttttagattctctcgggcctagccgtccttggaacccgatattcgggctgggcggttccgcggcctgggcctaggggcttaacagtagcaacagaagcggcggcggcggcagcagcagcagcagcagcagcaatctcttcccgaacacgagcaccacaggcgcccgaaggccggaacaggcgtttagagaaaatggcagacgatattgatattgaagcaatgcttgaggctccttacaagaagacttgcctaacgatatctcacctctactcccatgaattcacctttgattccagtgtgaactgtcaatcataaggatgagaacaagttgagcagtgccaacggccatgaagaacgtagcaaaaagaggaaaaaaagcaagagcagaagtcgtagtcatgaacgaaagagaagcaaaagtaaggaacggaagcgaagtagagacagagaaaggaaaaagagcaaaagccgtgaaagaaagcgaagtagaagcaaagagaggcgacggagccgctcaagaagtcgagatcgaagatttagaggccgctacagaagtccttactccggaccaaaatttaacagtgccatccgaggaaagattgggttgcctcatagcatcaaattaagcagacgacgttcccgaagcaaaagtccattcagaaaagacaagagccctgtgagagaacctattgataatttaactcctgaggaaagagatgcaaggacagtcttctgtatgcagctggcggcaagaattcgaccaagggatttggaagagtttttctctacagtaggaaaggttcgagatgtgaggatgatttctgacagaaattcaagacgttccaaaggaattgcttatgtggagttcgtcgatgttagctcagtgcctctagcaataggattaactggccaacgagttttaggcgtgccaatcatagtacaggcatcacaggcagaaaaaaacagagctgcagcaatggcaaacaatttacaaaagggaagtgctggacctatgaggctttatgtgggctcattacacttcaacataactgaagatatgcttcgtgggatctttgagccttttggaagaattgaaagtatccagctgatgatggacagtgaaactggtcgatccaagggatatggatttattacattttctgactcagaatgtgccaaaaaggctttggaacaacttaatggatttgaactagcaggaagaccaatgaaagttggtcatgttactgaacgtactgatgcttcgagtgctagttcatttttggacagtgatgaactggaaaggactggaattgatttgggaacaactggtcgtcttcagttaatggcaagacttgcagagggtacaggtttgcagattccgccagcagcacagcaagctctacagatgagtggctctttggcatttggtgctgtggcagaattctcttttgttatagatttgcaaacaagactttcccagcagactgaagcttcagctttagctgcagctgcctctgttcagccacttgcaacacaatgtttccaactctctaacatgtttaaccctcaaacagaagaagaagttggatgggataccgagattaaggatgatgtgattgaagaatgtaataaacatggaggagttattcatatttatgttgacaaaaattcagctcagggcaatgtgtatgtgaagtgcccatcaattgctgcagctattgctgctgtcaatgcattgcatggcaggtggtttgctggtaaaatgataacagcagcatatgtacctcttccaacttaccacaacctgtttcctgattctatgacagcaacacagctactggttccaagtagacgatgaaggaagatatagtcccttatgtatatagctttttttctttcttgagaattcatcttgagttatcttttatttagataaaaataaagaggcaaggatctactgtcatttgtatgcaatttcctgttaccttgaaaaaataaaaatgttaacagg

SEQ ID NO: 9920 - protein, 373 aa, Homo sapiens; identical to SEQ ID NO: 9876

SEQ ID NO: 9921 - DNA, 2506 bp, Homo sapiens
gtcttttaaagctattgggtgaaactagggatgggtcatcactatatccacattattttattctgccagtttgataggccctttctaaaataggttagagtccttatctttatgaaaaccatgctttatttttcactttgtcacaaatgatatgacaaatcatttttgaaattatgattgggttggtagacaaaatagcatggatttctgatatctatacattttttcccattttaggaaaaaaaagacaaattctgttattatttaaagtttattgacactgttcacatggtcctatcttcaagttccttcagtatacaccagttacatttcttcagctccctgagatgccaattttgagcacctaggacccagatttgcaaacaagactttcccagcagactgaaggtgagttgaagtgttcatattttttatttttgtctttgaaatagaattaaatgtagtaagacagttttctatatttattgtcatatttttataccagtaatttggaccaaattttgacacagtgacacatagtggtatattcatagtaatctgtctgtatttcagaagacctaacccaaattaatggacttaaaaaaaatcaaaataacaatttttttttttgctttagtttgcttaaaattttcaaccttgtttttgttttatgcctacctgtgtgttctaagtgttgataagttgcatatagaagtcaggaaatgaagtattctcttattaacgagtaggcaagtattttagaacctggaatctggaagttgtcttagtataaagttgtgaatcatgctataaaactcacctttttttgcttaagacatagtactcagtgatttatttaagccagtaccaagcaataagaggtttatacatacttaaattacatgcacatttcagagaaaccattcattaagtaggctatgatttcttgtttttagttatcactaaatctctgttgcttgacatgagcattttgctgttaatgtaagttctatatcttttgtaggagtatgcttaatgtttagggaaatgattatgagaaagatatgtcatgttccatcacagtcaagaattaaattttttcacaaacaagatgcttctaatcagtgctgttttgttaagagatttttaaaagattttcctagatttactgtgttctgcattgatctagcttgaacgtgaatgtttgtatagtacgttttcttaatattttttagtattcatagtatataatcatactaaacttgagaaactggaagaatcaagtcttcctcagttctgtttagactttctagttttttttaaggatacttccatatcttctgtaagctacacagtgagcttcatttttgcacagttataatacactctcgaatctttaacttttttccagcagaatttgacatgttatattaaaattttgttttatttaaaataaaactttatgaaagaaaaaacttatatgttacagagaagctaaagcacctgtaatgctaccagaaagttatcatttatgatatatttcatgcacagccctaatttctcggtgtaatatttctgatactttaagtgatcgtttattttaattaccataatttctaatgcactgttttatccttagctttgtttgttattatgttttggaatgaaatttggtcagataatatgattacggtgagttctgtaacagctactggtaatatttttgtaaatcacgtgaaagcattggagcaactgtcttggaaaatgctctttaaacttcaaaccccagtatgttttggtagtagtggatattacacatatatgctgctcttttcagtgttcttttattgtgcgaaaacatttttaaaacatttgatttattaataggatttatttttaataggattgttaataggatttatttttctaggacattgtctttaaacacttggatgattttatatgtcttaattctttaataatttgtagatttaaaaaacttcgtgggcagaaagcgaagaaataggaaaggatatagatttatttggcatttcaaaggattttgttttattatcccctcttatttgggtataaactcaaatctattttatccttcatctgtttggattgatgtgtattgagattttgtctaattgaactgattttgataacacataaagtttaatttccctgttaaaataggactcccaaatttctgaatgtctgtttcaagtattaggttacctcagttttctggcacctaaaagctactgataacatacattagtagcaatattaaataaggtaaaataactccagtgacatcctagttacatgcttggggtgggtttttggtttcgttttaaagtatttatgagggatactttcatgcattttccatgaaactaatttttctctttctttttttagcttcagctttagctgcagctgcctctgttcagccacttgcaacacaatgtttccaactctctaacatgtttaaccc

SEQ ID NO: 9922 - protein, 76 aa, Homo sapiens [sequence omitted]

SEQ ID NO: 9923 - DNA, 652 bp, Homo sapiens
tttttttttttttttaactttgcgtttattaacattgatacagttttctcaagactgtcgtcctgtcgtttctccttgtgtttgaaatgtaatgattttgccttttttttgttttgtttttgagatggagtctctctcaccaggctggagtgcaatggcatgatcgctgctcactgcaacctccacctcctgggttcaagcgctactcaggaggccgaggcaggagaattgcttaaacccaggaggcagaggttgcagtgaggcaagatcacgccattgcactgcagcctgggcgacaagaaccaagactgtgtctcaaaaagaaaaaagagttactcaaattatttcctatgttggaagacaaacttagtggctgggtgtgcattggcgggacccagggctgagaagtagcatattaagtgaggttttaaattcatgcagcaacctgttgtagagcagtactatccaatgtactctagtttgttacaagagaagcctgtgttagaatgcaaatggacaacttttctttttttttttttttgaggcgatcttggttatggagggatgacagctgactcaaaatgtttgcttggtgatacagttttatgttatggcatatacaccttattttatcacaaacaactacgttcgg

SEQ ID NO: 9924 - protein, 33 aa, Homo sapiens
MIAAHCNLHLLGSSATQEAEAGELLKPRRQRLQ

SEQ ID NO: 9925 - DNA, 660 bp, Homo sapiens
gtgtgtgtgtatgtgtgctggtgaatgtgagtacagggaagcagcggccgccatttcagggagcttgtcgacgctgtcgcaggggtggatcctgagctgccgaagccgccgtcctgctctcccgcgtgggcttctctaattccattgttttttttagattctctcgggcctagccgtccttggaacccgatattcgggctgggcggttccgcggcctgggcctaggggcttaacagtagcaacagaagcggcggcggcggcagcagcagcagcagcagcagcaatctcttcccgaacacgagcaccacaggcgcccgaaggccggaacaggcgtttagagaaaatggcagacgatattgatattgaagcaatgcttgaggctccttacaagaaggatgagaacaagttgagcagtgccaacggccatgaagaacgtagcaaaaagaggaaaaaaagcaagaaattcgaccaagggatttggaagagtttttctctacagtaggaaaggttcgagatgtgaggatgatttctgacagaaattcaagacgttccaaaggaattgcttatgtggagttcgtcgatgttagctcagtgcctctagcaataggattaactggccaacgagttttaggcgtgccaatcatagtacaggcatcacag

SEQ ID NO: 9926 - protein, 52 aa, Homo sapiens
MADDIDIEAMLEAPYKKDENKLSSANGHEERSKKRKKSKKFDQGIWKSFSLQ

SEQ ID NO: 9927 - DNA, 2023 bp, Homo sapiens
ttgtaatgcttagactcttgaagagctactttctgttttaatgttaagattcttgtgtcttagttttttttaacatggatgtaattccatgtaaacaggtatggaagtaggaaatgtttaggctggacttggtggattattaattgactttcttgggttcttgggagtcaacattactaaagcagtgtgaatccctgtttgcttcagggcgagatgtgtgacagaggtggcatcaagctcttacagtcccaaccctccaacggaaatgggcgaagatctcaggaatggcatcggtcacaggaaatcgatagtggctggctgctagcatggccacttggggcttaggcagaaatagagccatggtactgaccaaagggaccatagcacatggaataaaactcaaaacaggacttcatgttttatggaaattatatttaaccacttcaacattgtaaatctggataacttttaatatctaaactatataagaaagtaaaatttaacatgttaatatggaaaatttttttatttttgtatcttgatgacttaaatgtaagcaacaaagtggttaaacacatacccatctaaatttttttatagccttccatgttaaactataagtaaataattagttttaaaattgttttgtattttcttattcctgttccctttaccctttgacaacttgaaatgttaccacttcgtcctcatgatgttcttctatcaaccctgcttaggatgagaacaagttgagcagtgccaacggccatgaagaacgtagcaaaaagaggaaaaaaagcaagagcagaagtcgtagtcatgaacgaaagagaagcaaaagtaaggaacggaagcgaagtagagacagagaaaggaaaaagagcaaaagccgtgaaagaaagcgaagtagaagcaaagagaggcgacggagccgctcaagaagtcgagatcgaagatttagaggccgctacagaagtccttagtatgtaactatagttatgattttggtttgagggttattctctgggtattcagatggcagtttaacttgagtgatttgaattgtgaatttttatttttttaatgattggttaaaaagtattgaattaaggatattggcattgaatactagtaaagtgaaaatacagtgcatagacaaataagtaaaaatttgcttttactaggcatactgactattttctgttaaactatcagagtttctaaattgtatgccagtcaacgcaaactggatgaaagcactagagtgcttgaaaaagatgacattgtagtgcccaaatacctaagaaagcttaacaagtgtctgggctgttacagtatttgctaaatacatatttacttaaaattgtaaagttctgatgaatactaagttacacatgtataattagttaacagtaaataaaaagtctgtcaccgtggctgttttcagctgaaatgtcaggccagttgtgaatttgttgtgtatgctcattgataaagatccttttttgggctcatctgtatttaaggtttgttaataataataaaaggtattccaaactaaaagtgttttgaagattagatcactagaaatttggatgtggatatttaaagttggaaacaaatatattatggttattaaataactatattaaccacctacaattctaaggattgcatctagcaatctttaatgctttatgaggttaattcctcttaataaacacagtgctgtaaactctgggatatattaaaaataacccttctaacttctaagatttgaatggttaaggatggaattcaaagacaaacagacccgaatcacttgggcaagatacttaatcccctaagctaagcatttgttttctaaccttttaaggagataataagtttcagataagctattaatgagtaatgaatgagaagaaaatgtaaagtgctcagaggacttaatggattcatgaaatgttttggcattacatgaattccgattctggctcttttatctttaaaataaaaagaatta

SEQ ID NO: 9928 - protein, 73 aa, Homo sapiens [sequence omitted]

SEQ ID NO: 9929 - DNA, 1742 bp, Homo sapiens
aaatttggagcttggggcagcttctcgcgagagcccgtgctgagggctctgtgaggccccgtgtgtttgtgtgtgtgtatgtgtgctggtgaatgtgagtacagggaagcagcggccgccatttcagggagcttgtcgacgctgtcgcaggggtggatcctgagctgccgaagccgccgtcctgctctcccgcgtgggcttctctaattccattgttttttttagattctctcgggcctagccgtccttggaacccgatattcgggctgggcggttccgcggcctgggcctaggggcttaacagtagcaacagaagcggcggcggcggcagcagcagcagcagcagcagcaatctcttcccgaacacgagcaccacaggcgcccgaaggccggaacaggcgtttagagaaaatggcagacgatattgatattgaagcaatgcttgaggctccttacaagaagacttgcctaacgatatctcacctctactcccatgaattcacctttgattccagtgtgaactgtcaatcataaggatgagaacaagttgagcagtgccaacggccatgaagaacgtagcaaaaagaggaaaaaaagcaagagcagaaccgtgaaagaaagcgaagtagaagcaaagagaggcgacggagccgctcaagaagtcgagatcgaagatttagaggccgctacagaagtccttagtatgtaactatagttatgattttggtttgagggttattctctgggtattcagatggcagtttaacttgagtgatttgaattgtgaatttttatttttttaatgattggttaaaaagtattgaattaaggatattggcattgaatactagtaaagtgaaaatacagtgcatagacaaataagtaaaaatttgcttttactaggcatactgactattttctgttaaactatcagagtttctaaattgtatgccagtcaacgcaaactggatgaaagcactagagtgcttgaaaaagatgacattgtagtgcccaaatacctaagaaagcttaacaagtgtctgggctgttacagtatttgctaaatacatatttacttaaaattgtaaagttctgatgaatactaagttacacatgtataattagttaacagtaaataaaaagtctgtcaccgtggctgttttcagctgaaatgtcaggccagttgtgaatttgttgtgtatgctcattgataaagatccttttttgggctcatctgtatttaaggtttgttaataataataaaaggtattccaaactaaaagtgttttgaagattagatcactagaaatttggatgtggatatttaaagttggaaacaaatatattatggttattaaataactatattaaccacctacaattctaaggattgcatctagcaatctttaatgctttatgaggttaattcctcttaataaacacagtgctgtaaactctgggatatattaaaaataacccttctaacttctaagatttgaatggttaaggatggaattcaaagacaaacagacccgaatcacttgggcaagatacttaatcccctaagctaagcatttgttttctaaccttttaaggagataataagtttcagataagctattaatgagtaatgaatgagaagaaaatgtaaagtgctcagaggacttaatggattcatgaaatgttttggcattacatgaattccgattctggctcttttatctttaaaataaaaagaatta

SEQ ID NO: 9930 - protein, 40 aa, Homo sapiens
MADDIDIEAMLEAPYKKTCLTISHLYSHEFTFDSSVNCQS

SEQ ID NO: 9931 - DNA, 1559 bp, Homo sapiens
ttgtaatgcttagactcttgaagagctactttctgttttaatgttaagattcttgtgtcttagttttttttaacatggatgtaattccatgtaaacaggtatggaagtaggaaatgtttaggctggacttggtggattattaattgactttcttgggttcttgggagtcaacattactaaagcagtgtgaatccctgtttgcttcagggcgagatgtgtgacagaggtggcatcaagctcttacagtcccaaccctccaacggaaatgggcgaagatctcaggaatggcatcggtcacaggaaatcgatagtggctggctgctagcatggccacttggggcttaggcagaaatagagccatggtactgaccaaagggaccatagcacatggaataaaactcaaaacaggacttcatgttttatggaaattatatttaaccacttcaacattgtaaatctggataacttttaatatctaaactatataagaaagtaaaatttaacatgttaatatggaaaatttttttatttttgtatcttgatgacttaaatgtaagcaacaaagtggttaaacacatacccatctaaatttttttatagccttccatgttaaactataagtaaataattagttttaaaattgttttgtattttcttattcctgttccctttaccctttgacaacttgaaatgttaccacttcgtcctcatgatgttcttctatcaaccctgcttaggatgagaacaagttgagcagtgccaacggccatgaagaacgtagcaaaaagaggaaaaaaagcaagagcagaagtcgtagtcatgaacgaaagagaagcaaaagtaaggaacggaagcgaagtagagacagagaaaggaaaaagagcaaaagccgtgaaagaaagcgaagtagaagcaaagagaggcgacggagccgctcaagaagtcgagatcgaagatttagaggccgctacagaagtccttagtatgtaactatagttatgattttggtttgagggttattctctgggtattcagatggcagtttaacttgagtgatttgaattgtgaatttttatttttttaatgattggttaaaaagtattgaattaaggatattggcattgaatactagtaaagtgaaaatacagtgcatagacaaataagtaaaaatttgcttttactaggcatactgactattttctgttaaactatcagagtttctaaattgtatgccagtcaacgcaaactggatgaaagcactagagtgcttgaaaaagatgacattgtagtgcccaaatacctaagaaagcttaacaagtgtctgggctgttacagtatttgctaaatacatatttacttaaaattgtaaagttctgatgaatactaagttacacatgtataattagttaacagtaaataaaaagtctgtcaccgtggctgttttcagctgaaatgtcaggccagttgtgaatttgttgtgtatgctcattgataaagatccttttttgggctcatctgtatttaaggtttgttaataataataaaaggtattccaaact

SEQ ID NO: 9932 - protein, 73 aa, Homo sapiens [sequence omitted]

SEQ ID NO: 9933 - DNA, 1278 bp, Homo sapiens
aaatttggagcttggggcagcttctcgcgagagcccgtgctgagggctctgtgaggccccgtgtgtttgtgtgtgtgtatgtgtgctggtgaatgtgagtacagggaagcagcggccgccatttcagggagcttgtcgacgctgtcgcaggggtggatcctgagctgccgaagccgccgtcctgctctcccgcgtgggcttctctaattccattgttttttttagattctctcgggcctagccgtccttggaacccgatattcgggctgggcggttccgcggcctgggcctaggggcttaacagtagcaacagaagcggcggcggcggcagcagcagcagcagcagcagcaatctcttcccgaacacgagcaccacaggcgcccgaaggccggaacaggcgtttagagaaaatggcagacgatattgatattgaagcaatgcttgaggctccttacaagaagacttgcctaacgatatctcacctctactcccatgaattcacctttgattccagtgtgaactgtcaatcataaggatgagaacaagttgagcagtgccaacggccatgaagaacgtagcaaaaagaggaaaaaaagcaagagcagaaccgtgaaagaaagcgaagtagaagcaaagagaggcgacggagccgctcaagaagtcgagatcgaagatttagaggccgctacagaagtccttagtatgtaactatagttatgattttggtttgagggttattctctgggtattcagatggcagtttaacttgagtgatttgaattgtgaatttttatttttttaatgattggttaaaaagtattgaattaaggatattggcattgaatactagtaaagtgaaaatacagtgcatagacaaataagtaaaaatttgcttttactaggcatactgactattttctgttaaactatcagagtttctaaattgtatgccagtcaacgcaaactggatgaaagcactagagtgcttgaaaaagatgacattgtagtgcccaaatacctaagaaagcttaacaagtgtctgggctgttacagtatttgctaaatacatatttacttaaaattgtaaagttctgatgaatactaagttacacatgtataattagttaacagtaaataaaaagtctgtcaccgtggctgttttcagctgaaatgtcaggccagttgtgaatttgttgtgtatgctcattgataaagatccttttttgggctcatctgtatttaaggtttgttaataataataaaaggtattccaaact

SEQ ID NO: 9934 - protein, 40 aa, Homo sapiens; identical to SEQ ID NO: 9930

SEQ ID NO: 9935 - DNA, 1800 bp, Homo sapiens
aaatttggagcttggggcagcttctcgcgagagcccgtgctgagggctctgtgaggccccgtgtgtttgtgtgtgtgtatgtgtgctggtgaatgtgagtacagggaagcagcggccgccatttcagggagcttgtcgacgctgtcgcaggggtggatcctgagctgccgaagccgccgtcctgctctcccgcgtgggcttctctaattccattgttttttttagattctctcgggcctagccgtccttggaacccgatattcgggctgggcggttccgcggcctgggcctaggggcttaacagtagcaacagaagcggcggcggcggcagcagcagcagcagcagcagcaatctcttcccgaacacgagcaccacaggcgcccgaaggccggaacaggcgtttagagaaaatggcagacgatattgatattgaagcaatgcttgaggctccttacaagaagacttgcctaacgatatctcacctctactcccatgaattcacctttgattccagtgtgaactgtcaatcataaggatgagaacaagttgagcagtgccaacggccatgaagaacgtagcaaaaaaatactttgcattaaaaatttagatcttcttacatggaagaggtcaaatccagttatagcaaaacacctttactgcagaggccatataaccaaaaagtccaaaggcccagcccagtggaccatttacttcagtgatgttcagtacaaaatttcactgccattaaagactttggaaagtcccttttaagttgtaacaggatttgactattagtgtggatttcgataacccttctttagttaatgtaataaatgctctttgaagctggaaatatactggtttcttgcacccttgtagttttctctgggcttttatgcaaaagattgtattttctgaatgtcttagtatgttgctgtctttttacctgcctggggttgccttcagatgtgggtgaggacttgtttacaaaaagtcctagaagaccttaagttaaaattagctctccaattttcaagtgttttcttttggcagaataagttttgggtcctatgagaggtaaataggttggttgcctctcttgctatagcccatctagagcagaacaaaaactttgtttttgagggggatggagttactttttaccttgttccctaattgaatatatttaggacttttggttttagaaatctcagagttctatagttggaatagtgtcacagagatagtgttaggtttcttaggcaacaaaattggagtgttacctattgcccatctgggcatggctttgatgagttctatataaataatgagtgtagcctaattttctgtcatgtgctacctagcatatacatttctgacagtcaggtggattatcttgaaattttagacaaactttctgcctccttggaaagctctacatctccttgtgattggagtgtgggtttcaagattccagaaggtgggtgtcttcattttctattttcaatgcactctaaagatgacctgcttacaggttctctgaggcagacctcagttgctcttgtgatatgtaactttgctttgataaggaataaacaattacatatccagataatgatacagaattgtcaaaatgtttaatcattaagccactacaaatagacattttcgtggaataaactgattttgaaatgtctttcaatttatattgaaatatctgaaggcacctctaaaatttgggtgatgacacagaggtatagattataagatttaattatgaatgggtggtatactgtgaa

SEQ ID NO: 9936 - protein, 40 aa, Homo sapiens; identical to SEQ ID NO: 9930

SEQ ID NO: 9937 - DNA, 440 bp, Homo sapiens
cgaccttatgttaatgaaaaacgagagaaaaatagccatttatttgatttctttttggctcttttcctcctaagatccctaaatgcttcatagtaagtatgtcagtctttctcactacaactgtgttagaatactttgcattaaaaatttagatcttcttacatggaagaggtcaaatccagttatagcaaaacacctttactgcagaggccatataaccaaaaagtccaaaggcccagcccagtggaccatttacttcagtgatgttcagtacaaaatttcactgccattaaagactttggaaagtcccttttaagttgtaacaggatttgactattagtgtggatttcgataacccttctttagttaatgtaataaatgctctttgaagctggaaatatactggtttcttgcacccttgtagttttctctgggctttt

SEQ ID NO: 9938 - protein, 77 aa, Homo sapiens
MLHSKYVSLSHYNCVRILCIKNLDLLTWKRSNPVIAKHLYCRGHITKKSKGPAQWTIYFSDVQYKISLPLKTLESPF

SEQ ID NO: 9939 - DNA, 884 bp, Homo sapiens
gtgtgtgtgtatgtgtgctggtgaatgtgagtacagggaagcagcggccgccatttcagggagcttgtcgacgctgtcgcaggggtggatcctgagctgccgaagccgccgtcctgctctcccgcgtgggcttctctaattccattgttttttttagattctctcgggcctagccgtccttggaacccgatattcgggctgggcggttccgcggcctgggcctaggggcttaacagtagcaacagaagcggcggcggcggcagcagcagcagcagcagcagcaatctcttcccgaacacgagcaccacaggcgcccgaaggccggaacaggcgtttagagaaaatggcagacgatattgatattgaagcaatgcttgaggctccttacaagaagggcgagatgtgtgacagaggtggcatcaagctcttacagtcccaaccctccaacggaaatgggcgaagatctcaggaatggcatcggtcacaggaaatcgatagtggctggctgctagcatggccacttggggcttaggcagaaatagagccatggatgagaacaagttgagcagtgccaacggccatgaagaacgtagcaaaaaaatactttgcattaaaaatttagatcttcttacatggaagaggtcaaatccagttatagcaaaacacctttactgcagaggccatataaccaaaaagtccaaaggcccagcccagtggaccatttacttcagtgatgttcagtacaaaatttcactgccattaaagactttggaaagtcccttttaagttgtaacaggatttgactattagtgtggatttcgataacccttctttagttaatgtaataaatgctctttgaagctggaaatatactggtttcttgc

SEQ ID NO: 9940 - protein, 90 aa, Homo sapiens
MATWGLGRNRAMDENKLSSANGHEERSKKILCIKNLDLLTWKRSNPVIAKHLYCRGHITKKSKGPAQWTIYFSDVQYKISLPLKTLESPF

SEQ ID NO: 9941 - DNA, 1059 bp, Homo sapiens
ttgtaatgcttagactcttgaagagctactttctgttttaatgttaagattcttgtgtcttagttttttttaacatggatgtaattccatgtaaacaggtatggaagtaggaaatgtttaggctggacttggtggattattaattgactttcttgggttcttgggagtcaacattactaaagcagtgtgaatccctgtttgcttcagggcgagatgtgtgacagaggtggcatcaagctcttacagtcccaaccctccaacggaaatgggcgaagatctcaggaatggcatcggtcacaggaaatcgatagtggctggctgctagcatggccacttggggcttaggcagaaatagagccatggtactgaccaaagggaccatagcacatggaataaaactcaaaacaggacttcatgttttatggaaattatatttaaccacttcaacattgtaaatctggataacttttaatatctaaactatataagaaagtaaaatttaacatgttaatatggaaaatttttttatttttgtatcttgatgacttaaatgtaagcaacaaagtggttaaacacatacccatctaaatttttttatagccttccatgttaaactataagtaaataattagttttaaaattgttttgtattttcttattcctgttccctttaccctttgacaacttgaaatgttaccacttcgtcctcatgatgttcttctatcaaccctgcttaggatgagaacaagttgagcagtgccaacggccatgaagaacgtagcaaaaaaatactttgcattaaaaatttagatcttcttacatggaagaggtcaaatccagttatagcaaaacacctttactgcagaggccatataaccaaaaagtccaaaggcccagcccagtggaccatttacttcagtgatgttcagtacaaaatttcactgccattaaagactttggaaagtcccttttaagttgtaacaggatttgactattagtgtggatttcgataacccttctttagttaatgtaataaatgctctttgaagctggaaatat

SEQ ID NO: 9942 - protein, 43 aa, Homo sapiens
MCDRGGIKLLQSQPSNGNGRRSQEWHRSQEIDSGWLLAWPLGA

SEQ ID NO: 9943 - DNA, 716 bp, Homo sapiens
gtgtgtgtgtatgtgtgctggtgaatgtgagtacagggaagcagcggccgccatttcagggagcttgtcgacgctgtcgcaggggtggatcctgagctgccgaagccgccgtcctgctctcccgcgtgggcttctctaattccattgttttttttagattctctcgggcctagccgtccttggaacccgatattcgggctgggcggttccgcggcctgggcctaggggcttaacagtagcaacagaagcggcggcggcggcagcagcagcagcagcagcagcaatctcttcccgaacacgagcaccacaggcgcccgaaggccggaacaggcgtttagagaaaatggcagacgatattgatattgaagcaatgcttgaggctccttacaagaaggatgagaacaagttgagcagtgccaacggccatgaagaacgtagcaaaaaaatactttgcattaaaaatttagatcttcttacatggaagaggtcaaatccagttatagcaaaacacctttactgcagaggccatataaccaaaaagtccaaaggcccagcccagtggaccatttacttcagtgatgttcagtacaaaatttcactgccattaaagactttggaaagtcccttttaagttgtaacaggatttgactattagtgtggatttcgataacccttctttagttaatgtaataaatgctctttgaagctggaaatat

SEQ ID NO: 9944 - protein, 95 aa, Homo sapiens
MADDIDIEAMLEAPYKKDENKLSSANGHEERSKKILCIKNLDLLTWKRSNPVIAKHLYCRGHITKKSKGPAQWTIYFSDVQYKISLPLKTLESPF

SEQ ID NO: 9945 - DNA, 857 bp, Homo sapiens
aaatttggagcttggggcagcttctcgcgagagcccgtgctgagggctctgtgaggccccgtgtgtttgtgtgtgtgtatgtgtgctggtgaatgtgagtacagggaagcagcggccgccatttcagggagcttgtcgacgctgtcgcaggggtggatcctgagctgccgaagccgccgtcctgctctcccgcgtgggcttctctaattccattgttttttttagattctctcgggcctagccgtccttggaacccgatattcgggctgggcggttccgcggcctgggcctaggggcttaacagtagcaacagaagcggcggcggcggcagcagcagcagcagcagcagcaatctcttcccgaacacgagcaccacaggcgcccgaaggccggaacaggcgtttagagaaaatggcagacgatattgatattgaagcaatgcttgaggctccttacaagaagacttgcctaacgatatctcacctctactcccatgaattcacctttgattccagtgtgaactgtcaatcataaggatgagaacaagttgagcagtgccaacggccatgaagaacgtagcaaaaaaatactttgcattaaaaatttagatcttcttacatggaagaggtcaaatccagttatagcaaaacacctttactgcagaggccatataaccaaaaagtccaaaggcccagcccagtggaccatttacttcagtgatgttcagtacaaaatttcactgccattaaagactttggaaagtcccttttaagttgtaacaggatttgactattagtgtggatttcgataacccttctttagttaatgtaataaatgctctttgaagctggaaatat

SEQ ID NO: 9946 - protein, 40 aa, Homo sapiens; identical to SEQ ID NO: 9930

SEQ ID NO: 9947 - DNA, 2764 bp, Homo sapiens
gcccggaaagaggcgctctcgttcgggtctcccagtttctgtttttggagttgacagcagagttttaaatattggatattgaagtcttcattttcgtgtgtttcgtgcgtttagagaaaatggcagacgatattgatattgaagcaatgcttgaggctccttacaagaaggtgagaaaaaacatgtcggtgaggtttatatatttcttaatttagcattattcacgaaactactgctgaaatgtaaactaacctccccggagccctcttgatttatcttatcagagatgcattacgtgtaacttacaaaagtaaatatatgctattgatgtaataatattgtgcagtagtttcacttcagcgtgatgaataaatgcccatctatctctctttgtagacttgcctaacgatatctcacctctactcccatgaattcacctttgattccagtgtgaactgtcaatcataaggtagtaattgagtgacttatcgctgtaccgtggtcccctaggtaaaatgactcaactaagaattaccacctccagtttggtatagcaaaaaggtgaatgtagtggtttgggaaaaagcaggggtccaagaataacaaagcatgaccagtctgtggcaagttaaatcttctaacagtcttataagaagaaatgggtgagattttaaaatttatgtatctatgtaagactggtgatagtaaatcttaaaacagtccagtggcaatctgctgctcagttaataattactaaaattcttggatccctgaatagaaattaaaaaaaaaaaatacaagaggcagtagagtcaatacaagcttaatacaagcttagagtaaatacaagcttagagtcacttgatgactgttttactgttctccatattgtttttatttttaattaggccctaccatagtatttcacactaaaaacaaaggaattatattggctaatatagtctttgactcatttcggtatctcagtaaaagtaaactgtcttttcattgtttcaccagttggtggtgaaaatagcagtatgcatgcattatcactggtgtcacaaactgtaagctttgtaagttagcactttactcctatagctgatgtaatcaaactttaaaataaacatttcactaaaccttttaaaaataatacatttgttttggattgtatagcacgaccatgtggtaccaatttggatgaattcttgatagatttaaatagtgtatgtaattttgtaatgcttagactcttgaagagctactttctgttttaatgttaagattcttgtgtcttagttttttttaacatggatgtaattccatgtaaacaggtatggaagtaggaaatgtttaggctggacttggtggattattaattgactttcttgggttcttgggagtcaacattactaaagcagtgtgaatccctgtttgcttcagggcgagatgtgtgacagaggtggcatcaagctcttacagtcccaaccctccaacggaaatgggcgaagatctcaggaatggcatcggtcacaggaaatcgatagtggctggctgctagcatggccacttggggcttaggcagaaatagagccatggtactgaccaaagggaccatagcacatggaataaaactcaaaacaggacttcatgttttatggaaattatatttaaccacttcaacattgtaaatctggataacttttaatatctaaactatataagaaagtaaaatttaacatgttaatatggaaaatttttttatttttgtatcttgatgacttaaatgtaagcaacaaagtggttaaacacatacccatctaaatttttttatagccttccatgttaaactataagtaaataattagttttaaaattgttttgtattttcttattcctgttccctttaccctttgacaacttgaaatgttaccacttcgtcctcatgatgttcttctatcaaccctgcttaggatgagaacaagttgagcagtgccaacggccatgaagaacgtagcaaaaagtgagttttaagaaggggcttgggggagggtggtgagcttttttgtggttttagaccttaagttgtgttcctgtggctaaagtatacaaaattctcttctgaagcttttctttgctgcttttagaaaattggttctttgccttttgagacaaactcttggaggaactgtggatttttttgcttagatttcagaatatagtttcagataccttcccctccaagtccatcatgacaatctggtgacaagttctgtattagaggttgtcttgttttaaatttgttaactttggtttgatatttggttatcttactgataaaactgttatatatccattgatcttaaaaggtagaaagagttaaattaggtgataactaggccatggaaagtattgtttgccctaaagtgccgaaggagtcaaagctgtgaattatttctgcaacttgctgctcagaggcccttttggaagtgatggaacaggtacttaagtacttctaaaggtggctttcattatcttaggccttttaaactctagacttaacagggtggggattttggaaattatgaatatatctgtacactttatttgggtaagatgagtgactcaatagaactctgctatagactagtacagaaaacagtgtacgaaaagtcttaggtaacagatatgatgagatccactttttttttttcttttcttgtgagtcggagtcttgctctgtagcccaggctggagcgca

SEQ ID NO: 9948 - protein, 43 aa, Homo sapiens; identical to SEQ ID NO: 9942

SEQ ID NO: 9949 - DNA, 2547 bp, Homo sapiens
cgggtttttgcccggaaagaggcgctctcgttcgggtctcccagtttctgtttttggagttgacagcagagttttaaatattggatattgaagtcttcattttcgtgtgtttcgtgcgtttagagaaaatggcagacgatattgatattgaagcaatgcttgaggctccttacaagaagacttgcctaacgatatctcacctctactcccatgaattcacctttgattccagtgtgaactgtcaatcataaggtagtaattgagtgacttatcgctgtaccgtggtcccctaggtaaaatgactcaactaagaattaccacctccagtttggtatagcaaaaaggtgaatgtagtggtttgggaaaaagcaggggtccaagaataacaaagcatgaccagtctgtggcaagttaaatcttctaacagtcttataagaagaaatgggtgagattttaaaatttatgtatctatgtaagactggtgatagtaaatcttaaaacagtccagtggcaatctgctgctcagttaataattactaaaattcttggatccctgaatagaaattaaaaaaaaaaaatacaagaggcagtagagtcaatacaagcttaatacaagcttagagtaaatacaagcttagagtcacttgatgactgttttactgttctccatattgtttttatttttaattaggccctaccatagtatttcacactaaaaacaaaggaattatattggctaatatagtctttgactcatttcggtatctcagtaaaagtaaactgtcttttcattgtttcaccagttggtggtgaaaatagcagtatgcatgcattatcactggtgtcacaaactgtaagctttgtaagttagcactttactcctatagctgatgtaatcaaactttaaaataaacatttcactaaaccttttaaaaataatacatttgttttggattgtatagcacgaccatgtggtaccaatttggatgaattcttgatagatttaaatagtgtatgtaattttgtaatgcttagactcttgaagagctactttctgttttaatgttaagattcttgtgtcttagttttttttaacatggatgtaattccatgtaaacaggtatggaagtaggaaatgtttaggctggacttggtggattattaattgactttcttgggttcttgggagtcaacattactaaagcagtgtgaatccctgtttgcttcagggcgagatgtgtgacagaggtggcatcaagctcttacagtcccaaccctccaacggaaatgggcgaagatctcaggaatggcatcggtcacaggaaatcgatagtggctggctgctagcatggccacttggggcttaggcagaaatagagccatggtactgaccaaagggaccatagcacatggaataaaactcaaaacaggacttcatgttttatggaaattatatttaaccacttcaacattgtaaatctggataacttttaatatctaaactatataagaaagtaaaatttaacatgttaatatggaaaatttttttatttttgtatcttgatgacttaaatgtaagcaacaaagtggttaaacacatacccatctaaatttttttatagccttccatgttaaactataagtaaataattagttttaaaattgttttgtattttcttattcctgttccctttaccctttgacaacttgaaatgttaccacttcgtcctcatgatgttcttctatcaaccctgcttaggatgagaacaagttgagcagtgccaacggccatgaagaacgtagcaaaaagtgagttttaagaaggggcttgggggagggtggtgagcttttttgtggttttagaccttaagttgtgttcctgtggctaaagtatacaaaattctcttctgaagcttttctttgctgcttttagaaaattggttctttgccttttgagacaaactcttggaggaactgtggatttttttgcttagatttcagaatatagtttcagataccttcccctccaagtccatcatgacaatctggtgacaagttctgtattagaggttgtcttgttttaaatttgttaactttggtttgatatttggttatcttactgataaaactgttatatatccattgatcttaaaaggtagaaagagttaaattaggtgataactaggccatggaaagtattgtttgccctaaagtgccgaaggagtcaaagctgtgaattatttctgcaacttgctgctcagaggcccttttggaagtgatggaacaggtacttaagtacttctaaaggtggctttcattatcttaggccttttaaactctagacttaacagggtggggattttggaaattatgaatatatctgtacactttatttgggtaagatgagtgactcaatagaactctgctatagactagtacagaaaacagtgtacgaaaagtcttaggtaacagatatgatgagatccactttttttttttcttttcttgtgagtcggagtcttgctctgtagcccaggctggagcgca

SEQ ID NO: 9950 - protein, 40 aa, Homo sapiens; identical to SEQ ID NO: 9930

SEQ ID NO: 9951 - DNA, 2661 bp, Homo sapiens
tgtgtgctggtgaatgtgagtacagggaagcagcggccgccatttcagggagcttgtcgacgctgtcgcaggggtggatcctgagctgccgaagccgccgtcctgctctcccgcctgggcctaggggcttaacagtagcaacagaagcggcggcggcggcagcagcagcagcagcagcagcaatctcttcccgaacacgagcaccacaggcgcccgaaggccggaacaggcgtttagagaaaatggcagacgatattgatattgaagcaatgcttgaggctccttacaagaagacttgcctaacgatatctcacctctactcccatgaattcacctttgattccagtgtgaactgtcaatcataaggtagtaattgagtgacttatcgctgtaccgtggtcccctaggtaaaatgactcaactaagaattaccacctccagtttggtatagcaaaaaggtgaatgtagtggtttgggaaaaagcaggggtccaagaataacaaagcatgaccagtctgtggcaagttaaatcttctaacagtcttataagaagaaatgggtgagattttaaaatttatgtatctatgtaagactggtgatagtaaatcttaaaacagtccagtggcaatctgctgctcagttaataattactaaaattcttggatccctgaatagaaattaaaaaaaaaaaatacaagaggcagtagagtcaatacaagcttaatacaagcttagagtaaatacaagcttagagtcacttgatgactgttttactgttctccatattgtttttatttttaattaggccctaccatagtatttcacactaaaaacaaaggaattatattggctaatatagtctttgactcatttcggtatctcagtaaaagtaaactgtcttttcattgtttcaccagttggtggtgaaaatagcagtatgcatgcattatcactggtgtcacaaactgtaagctttgtaagttagcactttactcctatagctgatgtaatcaaactttaaaataaacatttcactaaaccttttaaaaataatacatttgttttggattgtatagcacgaccatgtggtaccaatttggatgaattcttgatagatttaaatagtgtatgtaattttgtaatgcttagactcttgaagagctactttctgttttaatgttaagattcttgtgtcttagttttttttaacatggatgtaattccatgtaaacaggtatggaagtaggaaatgtttaggctggacttggtggattattaattgactttcttgggttcttgggagtcaacattactaaagcagtgtgaatccctgtttgcttcagggcgagatgtgtgacagaggtggcatcaagctcttacagtcccaaccctccaacggaaatgggcgaagatctcaggaatggcatcggtcacaggaaatcgatagtggctggctgctagcatggccacttggggcttaggcagaaatagagccatggtactgaccaaagggaccatagcacatggaataaaactcaaaacaggacttcatgttttatggaaattatatttaaccacttcaacattgtaaatctggataacttttaatatctaaactatataagaaagtaaaatttaacatgttaatatggaaaatttttttatttttgtatcttgatgacttaaatgtaagcaacaaagtggttaaacacatacccatctaaatttttttatagccttccatgttaaactataagtaaataattagttttaaaattgttttgtattttcttattcctgttccctttaccctttgacaacttgaaatgttaccacttcgtcctcatgatgttcttctatcaaccctgcttaggatgagaacaagttgagcagtgccaacggccatgaagaacgtagcaaaaagtgagttttaagaaggggcttgggggagggtggtgagcttttttgtggttttagaccttaagttgtgttcctgtggctaaagtatacaaaattctcttctgaagcttttctttgctgcttttagaaaattggttctttgccttttgagacaaactcttggaggaactgtggatttttttgcttagatttcagaatatagtttcagataccttcccctccaagtccatcatgacaatctggtgacaagttctgtattagaggttgtcttgttttaaatttgttaactttggtttgatatttggttatcttactgataaaactgttatatatccattgatcttaaaaggtagaaagagttaaattaggtgataactaggccatggaaagtattgtttgccctaaagtgccgaaggagtcaaagctgtgaattatttctgcaacttgctgctcagaggcccttttggaagtgatggaacaggtacttaagtacttctaaaggtggctttcattatcttaggccttttaaactctagacttaacagggtggggattttggaaattatgaatatatctgtacactttatttgggtaagatgagtgactcaatagaactctgctatagactagtacagaaaacagtgtacgaaaagtcttaggtaacagatatgatgagatccactttttttttttcttttcttgtgagtcggagtcttgctctgtagcccaggctggagcgca

SEQ ID NO: 9952 - protein, 40 aa, Homo sapiens; identical to SEQ ID NO: 9930

SEQ ID NO: 9953 - DNA, 2888 bp, Homo sapiens
atgtgtgctggtgaatgtgagtacagggaagcagcggccgccatttcagggagcttgtcgacgctgtcgcaggggtggatcctgagctgccgaagccgccgtcctgctctcccgcctgggcctaggggcttaacagtagcaacagaagcggcggcggcggcagcagcagcagcagcagcagcaatctcttcccgaacacgagcaccacaggcgcccgaaggccggaacaggcgtttagagaaaatggcagacgatattgatattgaagcaatgcttgaggctccttacaagaaggtgagaaaaaacatgtcggtgaggtttatatatttcttaatttagcattattcacgaaactactgctgaaatgtaaactaacctccccggagccctcttgatttatcttatcagagatgcattacgtgtaacttacaaaagtaaatatatgctattgatgtaataatattgtgcagtagtttcacttcagcgtgatgaataaatgcccatctatctctctttgtagacttgcctaacgatatctcacctctactcccatgaattcacctttgattccagtgtgaactgtcaatcataaggtagtaattgagtgacttatcgctgtaccgtggtcccctaggtaaaatgactcaactaagaattaccacctccagtttggtatagcaaaaaggtgaatgtagtggtttgggaaaaagcaggggtccaagaataacaaagcatgaccagtctgtggcaagttaaatcttctaacagtcttataagaagaaatgggtgagattttaaaatttatgtatctatgtaagactggtgatagtaaatcttaaaacagtccagtggcaatctgctgctcagttaataattactaaaattcttggatccctgaatagaaattaaaaaaaaaaaatacaagaggcagtagagtcaatacaagcttaatacaagcttagagtaaatacaagcttagagtcacttgatgactgttttactgttctccatattgtttttatttttaattaggccctaccatagtatttcacactaaaaacaaaggaattatattggctaatatagtctttgactcatttcggtatctcagtaaaagtaaactgtcttttcattgtttcaccagttggtggtgaaaatagcagtatgcatgcattatcactggtgtcacaaactgtaagctttgtaagttagcactttactcctatagctgatgtaatcaaactttaaaataaacatttcactaaaccttttaaaaataatacatttgttttggattgtatagcacgaccatgtggtaccaatttggatgaattcttgatagatttaaatagtgtatgtaattttgtaatgcttagactcttgaagagctactttctgttttaatgttaagattcttgtgtcttagttttttttaacatggatgtaattccatgtaaacaggtatggaagtaggaaatgtttaggctggacttggtggattattaattgactttcttgggttcttgggagtcaacattactaaagcagtgtgaatccctgtttgcttcagggcgagatgtgtgacagaggtggcatcaagctcttacagtcccaaccctccaacggaaatgggcgaagatctcaggaatggcatcggtcacaggaaatcgatagtggctggctgctagcatggccacttggggcttaggcagaaatagagccatggtactgaccaaagggaccatagcacatggaataaaactcaaaacaggacttcatgttttatggaaattatatttaaccacttcaacattgtaaatctggataacttttaatatctaaactatataagaaagtaaaatttaacatgttaatatggaaaatttttttatttttgtatcttgatgacttaaatgtaagcaacaaagtggttaaacacatacccatctaaatttttttatagccttccatgttaaactataagtaaataattagttttaaaattgttttgtattttcttattcctgttccctttaccctttgacaacttgaaatgttaccacttcgtcctcatgatgttcttctatcaaccctgcttaggatgagaacaagttgagcagtgccaacggccatgaagaacgtagcaaaaagtgagttttaagaaggggcttgggggagggtggtgagcttttttgtggttttagaccttaagttgtgttcctgtggctaaagtatacaaaattctcttctgaagcttttctttgctgcttttagaaaattggttctttgccttttgagacaaactcttggaggaactgtggatttttttgcttagatttcagaatatagtttcagataccttcccctccaagtccatcatgacaatctggtgacaagttctgtattagaggttgtcttgttttaaatttgttaactttggtttgatatttggttatcttactgataaaactgttatatatccattgatcttaaaaggtagaaagagttaaattaggtgataactaggccatggaaagtattgtttgccctaaagtgccgaaggagtcaaagctgtgaattatttctgcaacttgctgctcagaggcccttttggaagtgatggaacaggtacttaagtacttctaaaggtggctttcattatcttaggccttttaaactctagacttaacagggtggggattttggaaattatgaatatatctgtacactttatttgggtaagatgagtgactcaatagaactctgctatagactagtacagaaaacagtgtacgaaaagtcttaggtaacagatatgatgagatccactttttttttttcttttcttgtgagtcggagtcttgctctgtagcccaggctggagcgca

SEQ ID NO: 9954 - protein, 112 aa, Homo sapiens
MCAGECEYREAAAAISGSLSTLSQGWILSCRSRRPALPPGPRGLTVATEAAAAAAAAAAAAISSRTRAPQAPEGRNRRLEKMADDIDIEAMLEAPYKKVRKNMSVRFIYFLI

SEQ ID NO: 9955 - DNA, 2629 bp, Homo sapiens
gtgtgtgtatgtgtgctggtgaatattctctcgggcctagccgtccttggaacccgatattcgggctgggcggttccgcggcctgggcctaggggcttaacagtagcaacagaagcggcggcggcggcagcagcagcagcagcagcagcaatctcttcccgaacacgagcaccacaggcgcccgaaggccggaacaggcgtttagagaaaatggcagacgatattgatattgaagcaatgcttgaggctccttacaagaagacttgcctaacgatatctcacctctactcccatgaattcacctttgattccagtgtgaactgtcaatcataaggtagtaattgagtgacttatcgctgtaccgtggtcccctaggtaaaatgactcaactaagaattaccacctccagtttggtatagcaaaaaggtgaatgtagtggtttgggaaaaagcaggggtccaagaataacaaagcatgaccagtctgtggcaagttaaatcttctaacagtcttataagaagaaatgggtgagattttaaaatttatgtatctatgtaagactggtgatagtaaatcttaaaacagtccagtggcaatctgctgctcagttaataattactaaaattcttggatccctgaatagaaattaaaaaaaaaaaatacaagaggcagtagagtcaatacaagcttaatacaagcttagagtaaatacaagcttagagtcacttgatgactgttttactgttctccatattgtttttatttttaattaggccctaccatagtatttcacactaaaaacaaaggaattatattggctaatatagtctttgactcatttcggtatctcagtaaaagtaaactgtcttttcattgtttcaccagttggtggtgaaaatagcagtatgcatgcattatcactggtgtcacaaactgtaagctttgtaagttagcactttactcctatagctgatgtaatcaaactttaaaataaacatttcactaaaccttttaaaaataatacatttgttttggattgtatagcacgaccatgtggtaccaatttggatgaattcttgatagatttaaatagtgtatgtaattttgtaatgcttagactcttgaagagctactttctgttttaatgttaagattcttgtgtcttagttttttttaacatggatgtaattccatgtaaacaggtatggaagtaggaaatgtttaggctggacttggtggattattaattgactttcttgggttcttgggagtcaacattactaaagcagtgtgaatccctgtttgcttcagggcgagatgtgtgacagaggtggcatcaagctcttacagtcccaaccctccaacggaaatgggcgaagatctcaggaatggcatcggtcacaggaaatcgatagtggctggctgctagcatggccacttggggcttaggcagaaatagagccatggtactgaccaaagggaccatagcacatggaataaaactcaaaacaggacttcatgttttatggaaattatatttaaccacttcaacattgtaaatctggataacttttaatatctaaactatataagaaagtaaaatttaacatgttaatatggaaaatttttttatttttgtatcttgatgacttaaatgtaagcaacaaagtggttaaacacatacccatctaaatttttttatagccttccatgttaaactataagtaaataattagttttaaaattgttttgtattttcttattcctgttccctttaccctttgacaacttgaaatgttaccacttcgtcctcatgatgttcttctatcaaccctgcttaggatgagaacaagttgagcagtgccaacggccatgaagaacgtagcaaaaagtgagttttaagaaggggcttgggggagggtggtgagcttttttgtggttttagaccttaagttgtgttcctgtggctaaagtatacaaaattctcttctgaagcttttctttgctgcttttagaaaattggttctttgccttttgagacaaactcttggaggaactgtggatttttttgcttagatttcagaatatagtttcagataccttcccctccaagtccatcatgacaatctggtgacaagttctgtattagaggttgtcttgttttaaatttgttaactttggtttgatatttggttatcttactgataaaactgttatatatccattgatcttaaaaggtagaaagagttaaattaggtgataactaggccatggaaagtattgtttgccctaaagtgccgaaggagtcaaagctgtgaattatttctgcaacttgctgctcagaggcccttttggaagtgatggaacaggtacttaagtacttctaaaggtggctttcattatcttaggccttttaaactctagacttaacagggtggggattttggaaattatgaatatatctgtacactttatttgggtaagatgagtgactcaatagaactctgctatagactagtacagaaaacagtgtacgaaaagtcttaggtaacagatatgatgagatccactttttttttttcttttcttgtgagtcggagtcttgctctgtagcccaggctggagcgca

SEQ ID NO: 9956 - protein, 40 aa, Homo sapiens; identical to SEQ ID NO: 9930

SEQ ID NO: 9957 - DNA, 2857 bp, Homo sapiens
gtgtgtgtgtatgtgtgctggtgaatattctctcgggcctagccgtccttggaacccgatattcgggctgggcggttccgcggcctgggcctaggggcttaacagtagcaacagaagcggcggcggcggcagcagcagcagcagcagcagcaatctcttcccgaacacgagcaccacaggcgcccgaaggccggaacaggcgtttagagaaaatggcagacgatattgatattgaagcaatgcttgaggctccttacaagaaggtgagaaaaaacatgtcggtgaggtttatatatttcttaatttagcattattcacgaaactactgctgaaatgtaaactaacctccccggagccctcttgatttatcttatcagagatgcattacgtgtaacttacaaaagtaaatatatgctattgatgtaataatattgtgcagtagtttcacttcagcgtgatgaataaatgcccatctatctctctttgtagacttgcctaacgatatctcacctctactcccatgaattcacctttgattccagtgtgaactgtcaatcataaggtagtaattgagtgacttatcgctgtaccgtggtcccctaggtaaaatgactcaactaagaattaccacctccagtttggtatagcaaaaaggtgaatgtagtggtttgggaaaaagcaggggtccaagaataacaaagcatgaccagtctgtggcaagttaaatcttctaacagtcttataagaagaaatgggtgagattttaaaatttatgtatctatgtaagactggtgatagtaaatcttaaaacagtccagtggcaatctgctgctcagttaataattactaaaattcttggatccctgaatagaaattaaaaaaaaaaaatacaagaggcagtagagtcaatacaagcttaatacaagcttagagtaaatacaagcttagagtcacttgatgactgttttactgttctccatattgtttttatttttaattaggccctaccatagtatttcacactaaaaacaaaggaattatattggctaatatagtctttgactcatttcggtatctcagtaaaagtaaactgtcttttcattgtttcaccagttggtggtgaaaatagcagtatgcatgcattatcactggtgtcacaaactgtaagctttgtaagttagcactttactcctatagctgatgtaatcaaactttaaaataaacatttcactaaaccttttaaaaataatacatttgttttggattgtatagcacgaccatgtggtaccaatttggatgaattcttgatagatttaaatagtgtatgtaattttgtaatgcttagactcttgaagagctactttctgttttaatgttaagattcttgtgtcttagttttttttaacatggatgtaattccatgtaaacaggtatggaagtaggaaatgtttaggctggacttggtggattattaattgactttcttgggttcttgggagtcaacattactaaagcagtgtgaatccctgtttgcttcagggcgagatgtgtgacagaggtggcatcaagctcttacagtcccaaccctccaacggaaatgggcgaagatctcaggaatggcatcggtcacaggaaatcgatagtggctggctgctagcatggccacttggggcttaggcagaaatagagccatggtactgaccaaagggaccatagcacatggaataaaactcaaaacaggacttcatgttttatggaaattatatttaaccacttcaacattgtaaatctggataacttttaatatctaaactatataagaaagtaaaatttaacatgttaatatggaaaatttttttatttttgtatcttgatgacttaaatgtaagcaacaaagtggttaaacacatacccatctaaatttttttatagccttccatgttaaactataagtaaataattagttttaaaattgttttgtattttcttattcctgttccctttaccctttgacaacttgaaatgttaccacttcgtcctcatgatgttcttctatcaaccctgcttaggatgagaacaagttgagcagtgccaacggccatgaagaacgtagcaaaaagtgagttttaagaaggggcttgggggagggtggtgagcttttttgtggttttagaccttaagttgtgttcctgtggctaaagtatacaaaattctcttctgaagcttttctttgctgcttttagaaaattggttctttgccttttgagacaaactcttggaggaactgtggatttttttgcttagatttcagaatatagtttcagataccttcccctccaagtccatcatgacaatctggtgacaagttctgtattagaggttgtcttgttttaaatttgttaactttggtttgatatttggttatcttactgataaaactgttatatatccattgatcttaaaaggtagaaagagttaaattaggtgataactaggccatggaaagtattgtttgccctaaagtgccgaaggagtcaaagctgtgaattatttctgcaacttgctgctcagaggcccttttggaagtgatggaacaggtacttaagtacttctaaaggtggctttcattatcttaggccttttaaactctagacttaacagggtggggattttggaaattatgaatatatctgtacactttatttgggtaagatgagtgactcaatagaactctgctatagactagtacagaaaacagtgtacgaaaagtcttaggtaacagatatgatgagatccactttttttttttcttttcttgtgagtcggagtcttgctctgtagcccaggctggagcgca

SEQ ID NO: 9958 - protein, 43 aa, Homo sapiens; identical to SEQ ID NO: 9942

SEQ ID NO: 9959 - DNA, 2794 bp, Homo sapiens
gtgctgagggctctgtgaggccccgtgtgtttgtgtgtgtgtatgtgtgctggtgaatgtgagtacagggaagcagcggccgccatttcagggagcttgtcgacgctgtcgcaggggtggatcctgagctgccgaagccgccgtcctgctctcccgcgtgggcttctctaattccattgttttttttagattctctcgggcctagccgtccttggaacccgatattcgggctgggcggttccgcggcctgggcctaggggcttaacagtagcaacagaagcggcggcggcggcagcagcagcagcagcagcagcaatctcttcccgaacacgagcaccacaggcgcccgaaggccggaacaggcgtttagagaaaatggcagacgatattgatattgaagcaatgcttgaggctccttacaagaagacttgcctaacgatatctcacctctactcccatgaattcacctttgattccagtgtgaactgtcaatcataaggtagtaattgagtgacttatcgctgtaccgtggtcccctaggtaaaatgactcaactaagaattaccacctccagtttggtatagcaaaaaggtgaatgtagtggtttgggaaaaagcaggggtccaagaataacaaagcatgaccagtctgtggcaagttaaatcttctaacagtcttataagaagaaatgggtgagattttaaaatttatgtatctatgtaagactggtgatagtaaatcttaaaacagtccagtggcaatctgctgctcagttaataattactaaaattcttggatccctgaatagaaattaaaaaaaaaaaatacaagaggcagtagagtcaatacaagcttaatacaagcttagagtaaatacaagcttagagtcacttgatgactgttttactgttctccatattgtttttatttttaattaggccctaccatagtatttcacactaaaaacaaaggaattatattggctaatatagtctttgactcatttcggtatctcagtaaaagtaaactgtcttttcattgtttcaccagttggtggtgaaaatagcagtatgcatgcattatcactggtgtcacaaactgtaagctttgtaagttagcactttactcctatagctgatgtaatcaaactttaaaataaacatttcactaaaccttttaaaaataatacatttgttttggattgtatagcacgaccatgtggtaccaatttggatgaattcttgatagatttaaatagtgtatgtaattttgtaatgcttagactcttgaagagctactttctgttttaatgttaagattcttgtgtcttagttttttttaacatggatgtaattccatgtaaacaggtatggaagtaggaaatgtttaggctggacttggtggattattaattgactttcttgggttcttgggagtcaacattactaaagcagtgtgaatccctgtttgcttcagggcgagatgtgtgacagaggtggcatcaagctcttacagtcccaaccctccaacggaaatgggcgaagatctcaggaatggcatcggtcacaggaaatcgatagtggctggctgctagcatggccacttggggcttaggcagaaatagagccatggtactgaccaaagggaccatagcacatggaataaaactcaaaacaggacttcatgttttatggaaattatatttaaccacttcaacattgtaaatctggataacttttaatatctaaactatataagaaagtaaaatttaacatgttaatatggaaaatttttttatttttgtatcttgatgacttaaatgtaagcaacaaagtggttaaacacatacccatctaaatttttttatagccttccatgttaaactataagtaaataattagttttaaaattgttttgtattttcttattcctgttccctttaccctttgacaacttgaaatgttaccacttcgtcctcatgatgttcttctatcaaccctgcttaggatgagaacaagttgagcagtgccaacggccatgaagaacgtagcaaaaagtgagttttaagaaggggcttgggggagggtggtgagcttttttgtggttttagaccttaagttgtgttcctgtggctaaagtatacaaaattctcttctgaagcttttctttgctgcttttagaaaattggttctttgccttttgagacaaactcttggaggaactgtggatttttttgcttagatttcagaatatagtttcagataccttcccctccaagtccatcatgacaatctggtgacaagttctgtattagaggttgtcttgttttaaatttgttaactttggtttgatatttggttatcttactgataaaactgttatatatccattgatcttaaaaggtagaaagagttaaattaggtgataactaggccatggaaagtattgtttgccctaaagtgccgaaggagtcaaagctgtgaattatttctgcaacttgctgctcagaggcccttttggaagtgatggaacaggtacttaagtacttctaaaggtggctttcattatcttaggccttttaaactctagacttaacagggtggggattttggaaattatgaatatatctgtacactttatttgggtaagatgagtgactcaatagaactctgctatagactagtacagaaaacagtgtacgaaaagtcttaggtaacagatatgatgagatccactttttttttttcttttcttgtgagtcggagtcttgctctgtagcccaggctggagcgca

SEQ ID NO: 9960 - protein, 40 aa, Homo sapiens; identical to SEQ ID NO: 9930

SEQ ID NO: 9961 - DNA, 1853 bp, Homo sapiens
aaatttggagcttggggcagcttctcgcgagagcccgtgctgagggctctgtgaggccccgtgtgtttgtgtgtgtgtatgtgtgctggtgaatgtgagtacagggaagcagcggccgccatttcagggagcttgtcgacgctgtcgcaggggtggatcctgagctgccgaagccgccgtcctgctctcccgcgtgggcttctctaattccattgttttttttagattctctcgggcctagccgtccttggaacccgatattcgggctgggcggttccgcggcctgggcctaggggcttaacagtagcaacagaagcggcggcggcggcagcagcagcagcagcagcagcaatctcttcccgaacacgagcaccacaggcgcccgaaggccggaacaggcgtttagagaaaatggcagacgatattgatattgaagcaatgcttgaggctccttacaagaagacttgcctaacgatatctcacctctactcccatgaattcacctttgattccagtgtgaactgtcaatcataagggcgagatgtgtgacagaggtggcatcaagctcttacagtcccaaccctccaacggaaatgggcgaagatctcaggaatggcatcggtcacaggaaatcgatagtggctggctgctagcatggccacttggggcttaggcagaaatagagccatggtactgaccaaagggaccatagcacatggaataaaactcaaaacaggacttcatgttttatggaaattatatttaaccacttcaacattgtaaatctggataacttttaatatctaaactatataagaaagtaaaatttaacatgttaatatggaaaatttttttatttttgtatcttgatgacttaaatgtaagcaacaaagtggttaaacacatacccatctaaatttttttatagccttccatgttaaactataagtaaataattagttttaaaattgttttgtattttcttattcctgttccctttaccctttgacaacttgaaatgttaccacttcgtcctcatgatgttcttctatcaaccctgcttaggatgagaacaagttgagcagtgccaacggccatgaagaacgtagcaaaaagtgagttttaagaaggggcttgggggagggtggtgagcttttttgtggttttagaccttaagttgtgttcctgtggctaaagtatacaaaattctcttctgaagcttttctttgctgcttttagaaaattggttctttgccttttgagacaaactcttggaggaactgtggatttttttgcttagatttcagaatatagtttcagataccttcccctccaagtccatcatgacaatctggtgacaagttctgtattagaggttgtcttgttttaaatttgttaactttggtttgatatttggttatcttactgataaaactgttatatatccattgatcttaaaaggtagaaagagttaaattaggtgataactaggccatggaaagtattgtttgccctaaagtgccgaaggagtcaaagctgtgaattatttctgcaacttgctgctcagaggcccttttggaagtgatggaacaggtacttaagtacttctaaaggtggctttcattatcttaggccttttaaactctagacttaacagggtggggattttggaaattatgaatatatctgtacactttatttgggtaagatgagtgactcaatagaactctgctatagactagtacagaaaacagtgtacgaaaagtcttaggtaacagatatgatgagatccactttttttttttcttttcttgtgagtcggagtcttgctctgtagcccaggctggagcgca

SEQ ID NO: 9962 - protein, 40 aa, Homo sapiens; identical to SEQ ID NO: 9930

SEQ ID NO: 9963 - DNA, 586 bp, Homo sapiens
aaatttggagcttggggcagcttctcgcgagagcccgtgctgagggctctgtgaggccccgtgtgtttgtgtgtgtgtatgtgtgctggtgaatgtgagtacagggaagcagcggccgccatttcagggagcttgtcgacgctgtcgcaggggtggatcctgagctgccgaagccgccgtcctgctctcccgcgtgggcttctctaattccattgttttttttagattctctcgggcctagccgtccttggaacccgatattcgggctgggcggttccgcggcctgggcctaggggcttaacagtagcaacagaagcggcggcggcggcagcagcagcagcagcagcagcaatctcttcccgaacacgagcaccacaggcgcccgaaggccggaacaggcgtttagagaaaatggcagacgatattgatattgaagcaatgcttgaggctccttacaagaagacttgcctaacgatatctcacctctactcccatgaattcacctttgattccagtgtgaactgtcaatcataaggatgagaacaagttgagcagtgccaacggccatgaagaacgtagcaaaaag

SEQ ID NO: 9964 - protein, 40 aa, Homo sapiens; identical to SEQ ID NO: 9930

SEQ ID NO: 9965 - DNA, 444 bp, Homo sapiens
gtgtgtgtgtatgtgtgctggtgaatgtgagtacagggaagcagcggccgccatttcagggagcttgtcgacgctgtcgcaggggtggatcctgagctgccgaagccgccgtcctgctctcccgcgtgggcttctctaattccattgttttttttagattctctcgggcctagccgtccttggaacccgatattcgggctgggcggttccgcggcctgggcctaggggcttaacagtagcaacagaagcggcggcggcggcagcagcagcagcagcagcagcaatctcttcccgaacacgagcaccacaggcgcccgaaggccggaacaggcgtttagagaaaatggcagacgatattgatattgaagcaatgcttgaggctccttacaagaaggatgagaacaagttgagcagtgccaacggccatgaagaacgtagcaaaaa

SEQ ID NO: 9966 - protein, 32 aa, Homo sapiens
MADDIDIEAMLEAPYKKDENKLSSANGHEERS

SEQ ID NO: 9967 - DNA, 547 bp, Homo sapiens
gtgtttgtgtgtgtgtatgtgtgctggtgaatattctctcgggcctagccgtccttggaacccgatattcgggctgggcggttccgcggcctgggcctaggggcttaacagtagcaacagaagcggcggcggcggcagcagcagcagcagcagcagcaatctcttcccgaacacgagcaccacaggcgcccgaaggccggaacaggcgtttagagaaaatggcagacgatattgatattgaagcaatgcttgaggctccttacaagaagacttgcctaacgatatctcacctctactcccatgaattcacctttgattccagtgtgaactgtcaatcataagggcgagatgtgtgacagaggtggcatcaagctcttacagtcccaaccctccaacggaaatgggcgaagatctcaggaatggcatcggtcacaggaaatcgatagtggctggctgctagcatggccacttggggcttaggcagaaatagagccatggatgagaacaagttgagcagtgccaacggccatgaagaacgtagcaaaaa

SEQ ID NO: 9968 - protein, 40 aa, Homo sapiens; identical to SEQ ID NO: 9930

SEQ ID NO: 9969 - DNA, 2021 bp, Homo sapiens
gcccggaaagaggcgctctcgttcgggtctcccagtttctgtttttggagttgacagcagagttttaaatattggatattgaagtcttcattttcgtgtgtttcgtgcgtttagagaaaatggcagacgatattgatattgaagcaatgcttgaggctccttacaagaaggtgagaaaaaacatgtcggtgaggtttatatatttcttaatttagcattattcacgaaactactgctgaaatgtaaactaacctccccggagccctcttgatttatcttatcagagatgcattacgtgtaacttacaaaagtaaatatatgctattgatgtaataatattgtgcagtagtttcacttcagcgtgatgaataaatgcccatctatctctctttgtagacttgcctaacgatatctcacctctactcccatgaattcacctttgattccagtgtgaactgtcaatcataaggtagtaattgagtgacttatcgctgtaccgtggtcccctaggtaaaatgactcaactaagaattaccacctccagtttggtatagcaaaaaggtgaatgtagtggtttgggaaaaagcaggggtccaagaataacaaagcatgaccagtctgtggcaagttaaatcttctaacagtcttataagaagaaatgggtgagattttaaaatttatgtatctatgtaagactggtgatagtaaatcttaaaacagtccagtggcaatctgctgctcagttaataattactaaaattcttggatccctgaatagaaattaaaaaaaaaaaatacaagaggcagtagagtcaatacaagcttaatacaagcttagagtaaatacaagcttagagtcacttgatgactgttttactgttctccatattgtttttatttttaattaggccctaccatagtatttcacactaaaaacaaaggaattatattggctaatatagtctttgactcatttcggtatctcagtaaaagtaaactgtcttttcattgtttcaccagttggtggtgaaaatagcagtatgcatgcattatcactggtgtcacaaactgtaagctttgtaagttagcactttactcctatagctgatgtaatcaaactttaaaataaacatttcactaaaccttttaaaaataatacatttgttttggattgtatagcacgaccatgtggtaccaatttggatgaattcttgatagatttaaatagtgtatgtaattttgtaatgcttagactcttgaagagctactttctgttttaatgttaagattcttgtgtcttagttttttttaacatggatgtaattccatgtaaacaggtatggaagtaggaaatgtttaggctggacttggtggattattaattgactttcttgggttcttgggagtcaacattactaaagcagtgtgaatccctgtttgcttcagggcgagatgtgtgacagaggtggcatcaagctcttacagtcccaaccctccaacggaaatgggcgaagatctcaggaatggcatcggtcacaggaaatcgatagtggctggctgctagcatggccacttggggcttaggcagaaatagagccatggtactgaccaaagggaccatagcacatggaataaaactcaaaacaggacttcatgttttatggaaattatatttaaccacttcaacattgtaaatctggataacttttaatatctaaactatataagaaagtaaaatttaacatgttaatatggaaaatttttttatttttgtatcttgatgacttaaatgtaagcaacaaagtggttaaacacatacccatctaaatttttttatagccttccatgttaaactataagtaaataattagttttaaaattgttttgtattttcttattcctgttccctttaccctttgacaacttgaaatgttaccacttcgtcctcatgatgttcttctatcaaccctgcttaggatgagaacaagttgagcagtgccaacggccatgaagaacgtagc

SEQ ID NO: 9970 - protein, 43 aa, Homo sapiens; identical to SEQ ID NO: 9942

SEQ ID NO: 9971 - DNA, 1804 bp, Homo sapiens
cgggtttttgcccggaaagaggcgctctcgttcgggtctcccagtttctgtttttggagttgacagcagagttttaaatattggatattgaagtcttcattttcgtgtgtttcgtgcgtttagagaaaatggcagacgatattgatattgaagcaatgcttgaggctccttacaagaagacttgcctaacgatatctcacctctactcccatgaattcacctttgattccagtgtgaactgtcaatcataaggtagtaattgagtgacttatcgctgtaccgtggtcccctaggtaaaatgactcaactaagaattaccacctccagtttggtatagcaaaaaggtgaatgtagtggtttgggaaaaagcaggggtccaagaataacaaagcatgaccagtctgtggcaagttaaatcttctaacagtcttataagaagaaatgggtgagattttaaaatttatgtatctatgtaagactggtgatagtaaatcttaaaacagtccagtggcaatctgctgctcagttaataattactaaaattcttggatccctgaatagaaattaaaaaaaaaaaatacaagaggcagtagagtcaatacaagcttaatacaagcttagagtaaatacaagcttagagtcacttgatgactgttttactgttctccatattgtttttatttttaattaggccctaccatagtatttcacactaaaaacaaaggaattatattggctaatatagtctttgactcatttcggtatctcagtaaaagtaaactgtcttttcattgtttcaccagttggtggtgaaaatagcagtatgcatgcattatcactggtgtcacaaactgtaagctttgtaagttagcactttactcctatagctgatgtaatcaaactttaaaataaacatttcactaaaccttttaaaaataatacatttgttttggattgtatagcacgaccatgtggtaccaatttggatgaattcttgatagatttaaatagtgtatgtaattttgtaatgcttagactcttgaagagctactttctgttttaatgttaagattcttgtgtcttagttttttttaacatggatgtaattccatgtaaacaggtatggaagtaggaaatgtttaggctggacttggtggattattaattgactttcttgggttcttgggagtcaacattactaaagcagtgtgaatccctgtttgcttcagggcgagatgtgtgacagaggtggcatcaagctcttacagtcccaaccctccaacggaaatgggcgaagatctcaggaatggcatcggtcacaggaaatcgatagtggctggctgctagcatggccacttggggcttaggcagaaatagagccatggtactgaccaaagggaccatagcacatggaataaaactcaaaacaggacttcatgttttatggaaattatatttaaccacttcaacattgtaaatctggataacttttaatatctaaactatataagaaagtaaaatttaacatgttaatatggaaaatttttttatttttgtatcttgatgacttaaatgtaagcaacaaagtggttaaacacatacccatctaaatttttttatagccttccatgttaaactataagtaaataattagttttaaaattgttttgtattttcttattcctgttccctttaccctttgacaacttgaaatgttaccacttcgtcctcatgatgttcttctatcaaccctgcttaggatgagaacaagttgagcagtgccaacggccatgaagaacgtagc

SEQ ID NO: 9972 - protein, 40 aa, Homo sapiens; identical to SEQ ID NO: 9930

SEQ ID NO: 9973 - DNA, 355 bp, Homo sapiens
attctctcgggcctagccgtccttggaacccgatattcgggctgggcggttccgcggcctgggcctaggggcttaacagtagcaacagaagcggcggcggcggcagcagcagcagcagcagcagcaatctcttcccgaacacgagcaccacaggcgcccgaaggccggaacaggcgtttagagaaaatggcagacgatattgatattgaagcaatgcttgaggctccttacaagaagacttgcctaacgatatctcacctctactcccatgaattcacctttgattccagtgtgaactgtcaatcataaggatgagaacaagttgagcagtgccaacggccatgaagaacgtagc

SEQ ID NO: 9974 - protein, 40 aa, Homo sapiens; identical to SEQ ID NO: 9930

SEQ ID NO: 9975 - DNA, 1918 bp, Homo sapiens
tgtgtgctggtgaatgtgagtacagggaagcagcggccgccatttcagggagcttgtcgacgctgtcgcaggggtggatcctgagctgccgaagccgccgtcctgctctcccgcctgggcctaggggcttaacagtagcaacagaagcggcggcggcggcagcagcagcagcagcagcagcaatctcttcccgaacacgagcaccacaggcgcccgaaggccggaacaggcgtttagagaaaatggcagacgatattgatattgaagcaatgcttgaggctccttacaagaagacttgcctaacgatatctcacctctactcccatgaattcacctttgattccagtgtgaactgtcaatcataaggtagtaattgagtgacttatcgctgtaccgtggtcccctaggtaaaatgactcaactaagaattaccacctccagtttggtatagcaaaaaggtgaatgtagtggtttgggaaaaagcaggggtccaagaataacaaagcatgaccagtctgtggcaagttaaatcttctaacagtcttataagaagaaatgggtgagattttaaaatttatgtatctatgtaagactggtgatagtaaatcttaaaacagtccagtggcaatctgctgctcagttaataattactaaaattcttggatccctgaatagaaattaaaaaaaaaaaatacaagaggcagtagagtcaatacaagcttaatacaagcttagagtaaatacaagcttagagtcacttgatgactgttttactgttctccatattgtttttatttttaattaggccctaccatagtatttcacactaaaaacaaaggaattatattggctaatatagtctttgactcatttcggtatctcagtaaaagtaaactgtcttttcattgtttcaccagttggtggtgaaaatagcagtatgcatgcattatcactggtgtcacaaactgtaagctttgtaagttagcactttactcctatagctgatgtaatcaaactttaaaataaacatttcactaaaccttttaaaaataatacatttgttttggattgtatagcacgaccatgtggtaccaatttggatgaattcttgatagatttaaatagtgtatgtaattttgtaatgcttagactcttgaagagctactttctgttttaatgttaagattcttgtgtcttagttttttttaacatggatgtaattccatgtaaacaggtatggaagtaggaaatgtttaggctggacttggtggattattaattgactttcttgggttcttgggagtcaacattactaaagcagtgtgaatccctgtttgcttcagggcgagatgtgtgacagaggtggcatcaagctcttacagtcccaaccctccaacggaaatgggcgaagatctcaggaatggcatcggtcacaggaaatcgatagtggctggctgctagcatggccacttggggcttaggcagaaatagagccatggtactgaccaaagggaccatagcacatggaataaaactcaaaacaggacttcatgttttatggaaattatatttaaccacttcaacattgtaaatctggataacttttaatatctaaactatataagaaagtaaaatttaacatgttaatatggaaaatttttttatttttgtatcttgatgacttaaatgtaagcaacaaagtggttaaacacatacccatctaaatttttttatagccttccatgttaaactataagtaaataattagttttaaaattgttttgtattttcttattcctgttccctttaccctttgacaacttgaaatgttaccacttcgtcctcatgatgttcttctatcaaccctgcttaggatgagaacaagttgagcagtgccaacggccatgaagaacgtagc

SEQ ID NO: 9976 - protein, 40 aa, Homo sapiens; identical to SEQ ID NO: 9930

SEQ ID NO: 9977 - DNA, 2145 bp, Homo sapiens
atgtgtgctggtgaatgtgagtacagggaagcagcggccgccatttcagggagcttgtcgacgctgtcgcaggggtggatcctgagctgccgaagccgccgtcctgctctcccgcctgggcctaggggcttaacagtagcaacagaagcggcggcggcggcagcagcagcagcagcagcagcaatctcttcccgaacacgagcaccacaggcgcccgaaggccggaacaggcgtttagagaaaatggcagacgatattgatattgaagcaatgcttgaggctccttacaagaaggtgagaaaaaacatgtcggtgaggtttatatatttcttaatttagcattattcacgaaactactgctgaaatgtaaactaacctccccggagccctcttgatttatcttatcagagatgcattacgtgtaacttacaaaagtaaatatatgctattgatgtaataatattgtgcagtagtttcacttcagcgtgatgaataaatgcccatctatctctctttgtagacttgcctaacgatatctcacctctactcccatgaattcacctttgattccagtgtgaactgtcaatcataaggtagtaattgagtgacttatcgctgtaccgtggtcccctaggtaaaatgactcaactaagaattaccacctccagtttggtatagcaaaaaggtgaatgtagtggtttgggaaaaagcaggggtccaagaataacaaagcatgaccagtctgtggcaagttaaatcttctaacagtcttataagaagaaatgggtgagattttaaaatttatgtatctatgtaagactggtgatagtaaatcttaaaacagtccagtggcaatctgctgctcagttaataattactaaaattcttggatccctgaatagaaattaaaaaaaaaaaatacaagaggcagtagagtcaatacaagcttaatacaagcttagagtaaatacaagcttagagtcacttgatgactgttttactgttctccatattgtttttatttttaattaggccctaccatagtatttcacactaaaaacaaaggaattatattggctaatatagtctttgactcatttcggtatctcagtaaaagtaaactgtcttttcattgtttcaccagttggtggtgaaaatagcagtatgcatgcattatcactggtgtcacaaactgtaagctttgtaagttagcactttactcctatagctgatgtaatcaaactttaaaataaacatttcactaaaccttttaaaaataatacatttgttttggattgtatagcacgaccatgtggtaccaatttggatgaattcttgatagatttaaatagtgtatgtaattttgtaatgcttagactcttgaagagctactttctgttttaatgttaagattcttgtgtcttagttttttttaacatggatgtaattccatgtaaacaggtatggaagtaggaaatgtttaggctggacttggtggattattaattgactttcttgggttcttgggagtcaacattactaaagcagtgtgaatccctgtttgcttcagggcgagatgtgtgacagaggtggcatcaagctcttacagtcccaaccctccaacggaaatgggcgaagatctcaggaatggcatcggtcacaggaaatcgatagtggctggctgctagcatggccacttggggcttaggcagaaatagagccatggtactgaccaaagggaccatagcacatggaataaaactcaaaacaggacttcatgttttatggaaattatatttaaccacttcaacattgtaaatctggataacttttaatatctaaactatataagaaagtaaaatttaacatgttaatatggaaaatttttttatttttgtatcttgatgacttaaatgtaagcaacaaagtggttaaacacatacccatctaaatttttttatagccttccatgttaaactataagtaaataattagttttaaaattgttttgtattttcttattcctgttccctttaccctttgacaacttgaaatgttaccacttcgtcctcatgatgttcttctatcaaccctgcttaggatgagaacaagttgagcagtgccaacggccatgaagaacgtagc

SEQ ID NO: 9978 - protein, 112 aa, Homo sapiens; identical to SEQ ID NO: 9954

SEQ ID NO: 9979 - DNA, 1886 bp, Homo sapiens
gtgtgtgtatgtgtgctggtgaatattctctcgggcctagccgtccttggaacccgatattcgggctgggcggttccgcggcctgggcctaggggcttaacagtagcaacagaagcggcggcggcggcagcagcagcagcagcagcagcaatctcttcccgaacacgagcaccacaggcgcccgaaggccggaacaggcgtttagagaaaatggcagacgatattgatattgaagcaatgcttgaggctccttacaagaagacttgcctaacgatatctcacctctactcccatgaattcacctttgattccagtgtgaactgtcaatcataaggtagtaattgagtgacttatcgctgtaccgtggtcccctaggtaaaatgactcaactaagaattaccacctccagtttggtatagcaaaaaggtgaatgtagtggtttgggaaaaagcaggggtccaagaataacaaagcatgaccagtctgtggcaagttaaatcttctaacagtcttataagaagaaatgggtgagattttaaaatttatgtatctatgtaagactggtgatagtaaatcttaaaacagtccagtggcaatctgctgctcagttaataattactaaaattcttggatccctgaatagaaattaaaaaaaaaaaatacaagaggcagtagagtcaatacaagcttaatacaagcttagagtaaatacaagcttagagtcacttgatgactgttttactgttctccatattgtttttatttttaattaggccctaccatagtatttcacactaaaaacaaaggaattatattggctaatatagtctttgactcatttcggtatctcagtaaaagtaaactgtcttttcattgtttcaccagttggtggtgaaaatagcagtatgcatgcattatcactggtgtcacaaactgtaagctttgtaagttagcactttactcctatagctgatgtaatcaaactttaaaataaacatttcactaaaccttttaaaaataatacatttgttttggattgtatagcacgaccatgtggtaccaatttggatgaattcttgatagatttaaatagtgtatgtaattttgtaatgcttagactcttgaagagctactttctgttttaatgttaagattcttgtgtcttagttttttttaacatggatgtaattccatgtaaacaggtatggaagtaggaaatgtttaggctggacttggtggattattaattgactttcttgggttcttgggagtcaacattactaaagcagtgtgaatccctgtttgcttcagggcgagatgtgtgacagaggtggcatcaagctcttacagtcccaaccctccaacggaaatgggcgaagatctcaggaatggcatcggtcacaggaaatcgatagtggctggctgctagcatggccacttggggcttaggcagaaatagagccatggtactgaccaaagggaccatagcacatggaataaaactcaaaacaggacttcatgttttatggaaattatatttaaccacttcaacattgtaaatctggataacttttaatatctaaactatataagaaagtaaaatttaacatgttaatatggaaaatttttttatttttgtatcttgatgacttaaatgtaagcaacaaagtggttaaacacatacccatctaaatttttttatagccttccatgttaaactataagtaaataattagttttaaaattgttttgtattttcttattcctgttccctttaccctttgacaacttgaaatgttaccacttcgtcctcatgatgttcttctatcaaccctgcttaggatgagaacaagttgagcagtgccaacggccatgaagaacgtagc

SEQ ID NO: 9980 - protein, 40 aa, Homo sapiens; identical to SEQ ID NO: 9930

SEQ ID NO: 9981 - DNA, 439 bp, Homo sapiens
gtgtgtgtgtatgtgtgctggtgaatgtgagtacagggaagcagcggccgccatttcagggagcttgtcgacgctgtcgcaggggtggatcctgagctgccgaagccgccgtcctgctctcccgcgtgggcttctctaattccattgttttttttagattctctcgggcctagccgtccttggaacccgatattcgggctgggcggttccgcggcctgggcctaggggcttaacagtagcaacagaagcggcggcggcggcagcagcagcagcagcagcagcaatctcttcccgaacacgagcaccacaggcgcccgaaggccggaacaggcgtttagagaaaatggcagacgatattgatattgaagcaatgcttgaggctccttacaagaaggatgagaacaagttgagcagtgccaacggccatgaagaacgtagc

SEQ ID NO: 9982 - protein, 31 aa, Homo sapiens
MADDIDIEAMLEAPYKKDENKLSSANGHEER

SEQ ID NO: 9983 - DNA, 2114 bp, Homo sapiens
gtgtgtgtgtatgtgtgctggtgaatattctctcgggcctagccgtccttggaacccgatattcgggctgggcggttccgcggcctgggcctaggggcttaacagtagcaacagaagcggcggcggcggcagcagcagcagcagcagcagcaatctcttcccgaacacgagcaccacaggcgcccgaaggccggaacaggcgtttagagaaaatggcagacgatattgatattgaagcaatgcttgaggctccttacaagaaggtgagaaaaaacatgtcggtgaggtttatatatttcttaatttagcattattcacgaaactactgctgaaatgtaaactaacctccccggagccctcttgatttatcttatcagagatgcattacgtgtaacttacaaaagtaaatatatgctattgatgtaataatattgtgcagtagtttcacttcagcgtgatgaataaatgcccatctatctctctttgtagacttgcctaacgatatctcacctctactcccatgaattcacctttgattccagtgtgaactgtcaatcataaggtagtaattgagtgacttatcgctgtaccgtggtcccctaggtaaaatgactcaactaagaattaccacctccagtttggtatagcaaaaaggtgaatgtagtggtttgggaaaaagcaggggtccaagaataacaaagcatgaccagtctgtggcaagttaaatcttctaacagtcttataagaagaaatgggtgagattttaaaatttatgtatctatgtaagactggtgatagtaaatcttaaaacagtccagtggcaatctgctgctcagttaataattactaaaattcttggatccctgaatagaaattaaaaaaaaaaaatacaagaggcagtagagtcaatacaagcttaatacaagcttagagtaaatacaagcttagagtcacttgatgactgttttactgttctccatattgtttttatttttaattaggccctaccatagtatttcacactaaaaacaaaggaattatattggctaatatagtctttgactcatttcggtatctcagtaaaagtaaactgtcttttcattgtttcaccagttggtggtgaaaatagcagtatgcatgcattatcactggtgtcacaaactgtaagctttgtaagttagcactttactcctatagctgatgtaatcaaactttaaaataaacatttcactaaaccttttaaaaataatacatttgttttggattgtatagcacgaccatgtggtaccaatttggatgaattcttgatagatttaaatagtgtatgtaattttgtaatgcttagactcttgaagagctactttctgttttaatgttaagattcttgtgtcttagttttttttaacatggatgtaattccatgtaaacaggtatggaagtaggaaatgtttaggctggacttggtggattattaattgactttcttgggttcttgggagtcaacattactaaagcagtgtgaatccctgtttgcttcagggcgagatgtgtgacagaggtggcatcaagctcttacagtcccaaccctccaacggaaatgggcgaagatctcaggaatggcatcggtcacaggaaatcgatagtggctggctgctagcatggccacttggggcttaggcagaaatagagccatggtactgaccaaagggaccatagcacatggaataaaactcaaaacaggacttcatgttttatggaaattatatttaaccacttcaacattgtaaatctggataacttttaatatctaaactatataagaaagtaaaatttaacatgttaatatggaaaatttttttatttttgtatcttgatgacttaaatgtaagcaacaaagtggttaaacacatacccatctaaatttttttatagccttccatgttaaactataagtaaataattagttttaaaattgttttgtattttcttattcctgttccctttaccctttgacaacttgaaatgttaccacttcgtcctcatgatgttcttctatcaaccctgcttaggatgagaacaagttgagcagtgccaacggccatgaagaacgtagc

SEQ ID NO: 9984 - protein, 43 aa, Homo sapiens; identical to SEQ ID NO: 9942

SEQ ID NO: 9985 - DNA, 2051 bp, Homo sapiens
gtgctgagggctctgtgaggccccgtgtgtttgtgtgtgtgtatgtgtgctggtgaatgtgagtacagggaagcagcggccgccatttcagggagcttgtcgacgctgtcgcaggggtggatcctgagctgccgaagccgccgtcctgctctcccgcgtgggcttctctaattccattgttttttttagattctctcgggcctagccgtccttggaacccgatattcgggctgggcggttccgcggcctgggcctaggggcttaacagtagcaacagaagcggcggcggcggcagcagcagcagcagcagcagcaatctcttcccgaacacgagcaccacaggcgcccgaaggccggaacaggcgtttagagaaaatggcagacgatattgatattgaagcaatgcttgaggctccttacaagaagacttgcctaacgatatctcacctctactcccatgaattcacctttgattccagtgtgaactgtcaatcataaggtagtaattgagtgacttatcgctgtaccgtggtcccctaggtaaaatgactcaactaagaattaccacctccagtttggtatagcaaaaaggtgaatgtagtggtttgggaaaaagcaggggtccaagaataacaaagcatgaccagtctgtggcaagttaaatcttctaacagtcttataagaagaaatgggtgagattttaaaatttatgtatctatgtaagactggtgatagtaaatcttaaaacagtccagtggcaatctgctgctcagttaataattactaaaattcttggatccctgaatagaaattaaaaaaaaaaaatacaagaggcagtagagtcaatacaagcttaatacaagcttagagtaaatacaagcttagagtcacttgatgactgttttactgttctccatattgtttttatttttaattaggccctaccatagtatttcacactaaaaacaaaggaattatattggctaatatagtctttgactcatttcggtatctcagtaaaagtaaactgtcttttcattgtttcaccagttggtggtgaaaatagcagtatgcatgcattatcactggtgtcacaaactgtaagctttgtaagttagcactttactcctatagctgatgtaatcaaactttaaaataaacatttcactaaaccttttaaaaataatacatttgttttggattgtatagcacgaccatgtggtaccaatttggatgaattcttgatagatttaaatagtgtatgtaattttgtaatgcttagactcttgaagagctactttctgttttaatgttaagattcttgtgtcttagttttttttaacatggatgtaattccatgtaaacaggtatggaagtaggaaatgtttaggctggacttggtggattattaattgactttcttgggttcttgggagtcaacattactaaagcagtgtgaatccctgtttgcttcagggcgagatgtgtgacagaggtggcatcaagctcttacagtcccaaccctccaacggaaatgggcgaagatctcaggaatggcatcggtcacaggaaatcgatagtggctggctgctagcatggccacttggggcttaggcagaaatagagccatggtactgaccaaagggaccatagcacatggaataaaactcaaaacaggacttcatgttttatggaaattatatttaaccacttcaacattgtaaatctggataacttttaatatctaaactatataagaaagtaaaatttaacatgttaatatggaaaatttttttatttttgtatcttgatgacttaaatgtaagcaacaaagtggttaaacacatacccatctaaatttttttatagccttccatgttaaactataagtaaataattagttttaaaattgttttgtattttcttattcctgttccctttaccctttgacaacttgaaatgttaccacttcgtcctcatgatgttcttctatcaaccctgcttaggatgagaacaagttgagcagtgccaacggccatgaagaacgtagc

SEQ ID NO: 9986 - protein, 40 aa, Homo sapiens; identical to SEQ ID NO: 9930

SEQ ID NO: 9987 - DNA, 2313 bp, Homo sapiens
aaatttggagcttggggcagcttctcgcgagagcccgtgctgagggctctgtgaggccccgtgtgtttgtgtgtgtgtatgtgtgctggtgaatgtgagtacagggaagcagcggccgccatttcagggagcttgtcgacgctgtcgcaggggtggatcctgagctgccgaagccgccgtcctgctctcccgcgtgggcttctctaattccattgttttttttagattctctcgggcctagccgtccttggaacccgatattcgggctgggcggttccgcggcctgggcctaggggcttaacagtagcaacagaagcggcggcggcggcagcagcagcagcagcagcagcaatctcttcccgaacacgagcaccacaggcgcccgaaggccggaacaggcgtttagagaaaatggcagacgatattgatattgaagcaatgcttgaggctccttacaagaaggtgagaaaaaacatgtcggtgaggtttatatatttcttaatttagcattattcacgaaactactgctgaaatgtaaactaacctccccggagccctcttgatttatcttatcagagatgcattacgtgtaacttacaaaagtaaatatatgctattgatgtaataatattgtgcagtagtttcacttcagcgtgatgaataaatgcccatctatctctctttgtagacttgcctaacgatatctcacctctactcccatgaattcacctttgattccagtgtgaactgtcaatcataaggtagtaattgagtgacttatcgctgtaccgtggtcccctaggtaaaatgactcaactaagaattaccacctccagtttggtatagcaaaaaggtgaatgtagtggtttgggaaaaagcaggggtccaagaataacaaagcatgaccagtctgtggcaagttaaatcttctaacagtcttataagaagaaatgggtgagattttaaaatttatgtatctatgtaagactggtgatagtaaatcttaaaacagtccagtggcaatctgctgctcagttaataattactaaaattcttggatccctgaatagaaattaaaaaaaaaaaatacaagaggcagtagagtcaatacaagcttaatacaagcttagagtaaatacaagcttagagtcacttgatgactgttttactgttctccatattgtttttatttttaattaggccctaccatagtatttcacactaaaaacaaaggaattatattggctaatatagtctttgactcatttcggtatctcagtaaaagtaaactgtcttttcattgtttcaccagttggtggtgaaaatagcagtatgcatgcattatcactggtgtcacaaactgtaagctttgtaagttagcactttactcctatagctgatgtaatcaaactttaaaataaacatttcactaaaccttttaaaaataatacatttgttttggattgtatagcacgaccatgtggtaccaatttggatgaattcttgatagatttaaatagtgtatgtaattttgtaatgcttagactcttgaagagctactttctgttttaatgttaagattcttgtgtcttagttttttttaacatggatgtaattccatgtaaacaggtatggaagtaggaaatgtttaggctggacttggtggattattaattgactttcttgggttcttgggagtcaacattactaaagcagtgtgaatccctgtttgcttcagggcgagatgtgtgacagaggtggcatcaagctcttacagtcccaaccctccaacggaaatgggcgaagatctcaggaatggcatcggtcacaggaaatcgatagtggctggctgctagcatggccacttggggcttaggcagaaatagagccatggtactgaccaaagggaccatagcacatggaataaaactcaaaacaggacttcatgttttatggaaattatatttaaccacttcaacattgtaaatctggataacttttaatatctaaactatataagaaagtaaaatttaacatgttaatatggaaaatttttttatttttgtatcttgatgacttaaatgtaagcaacaaagtggttaaacacatacccatctaaatttttttatagccttccatgttaaactataagtaaataattagttttaaaattgttttgtattttcttattcctgttccctttaccctttgacaacttgaaatgttaccacttcgtcctcatgatgttcttctatcaaccctgcttaggatgagaacaagttgagcagtgccaacggccatgaagaacgtagc

SEQ ID NO: 9988 - protein, 43 aa, Homo sapiens; identical to SEQ ID NO: 9942

SEQ ID NO: 9989 - DNA, 1110 bp, Homo sapiens
aaatttggagcttggggcagcttctcgcgagagcccgtgctgagggctctgtgaggccccgtgtgtttgtgtgtgtgtatgtgtgctggtgaatgtgagtacagggaagcagcggccgccatttcagggagcttgtcgacgctgtcgcaggggtggatcctgagctgccgaagccgccgtcctgctctcccgcgtgggcttctctaattccattgttttttttagattctctcgggcctagccgtccttggaacccgatattcgggctgggcggttccgcggcctgggcctaggggcttaacagtagcaacagaagcggcggcggcggcagcagcagcagcagcagcagcaatctcttcccgaacacgagcaccacaggcgcccgaaggccggaacaggcgtttagagaaaatggcagacgatattgatattgaagcaatgcttgaggctccttacaagaagacttgcctaacgatatctcacctctactcccatgaattcacctttgattccagtgtgaactgtcaatcataagggcgagatgtgtgacagaggtggcatcaagctcttacagtcccaaccctccaacggaaatgggcgaagatctcaggaatggcatcggtcacaggaaatcgatagtggctggctgctagcatggccacttggggcttaggcagaaatagagccatggtactgaccaaagggaccatagcacatggaataaaactcaaaacaggacttcatgttttatggaaattatatttaaccacttcaacattgtaaatctggataacttttaatatctaaactatataagaaagtaaaatttaacatgttaatatggaaaatttttttatttttgtatcttgatgacttaaatgtaagcaacaaagtggttaaacacatacccatctaaatttttttatagccttccatgttaaactataagtaaataattagttttaaaattgttttgtattttcttattcctgttccctttaccctttgacaacttgaaatgttaccacttcgtcctcatgatgttcttctatcaaccctgcttaggatgagaacaagttgagcagtgccaacggccatgaagaacgtagc

SEQ ID NO: 9990 - protein, 40 aa, Homo sapiens; identical to SEQ ID NO: 9930

SEQ ID NO: 9991 - DNA, 580 bp, Homo sapiens
aaatttggagcttggggcagcttctcgcgagagcccgtgctgagggctctgtgaggccccgtgtgtttgtgtgtgtgtatgtgtgctggtgaatgtgagtacagggaagcagcggccgccatttcagggagcttgtcgacgctgtcgcaggggtggatcctgagctgccgaagccgccgtcctgctctcccgcgtgggcttctctaattccattgttttttttagattctctcgggcctagccgtccttggaacccgatattcgggctgggcggttccgcggcctgggcctaggggcttaacagtagcaacagaagcggcggcggcggcagcagcagcagcagcagcagcaatctcttcccgaacacgagcaccacaggcgcccgaaggccggaacaggcgtttagagaaaatggcagacgatattgatattgaagcaatgcttgaggctccttacaagaagacttgcctaacgatatctcacctctactcccatgaattcacctttgattccagtgtgaactgtcaatcataaggatgagaacaagttgagcagtgccaacggccatgaagaacgtagc

SEQ ID NO: 9992 - protein, 40 aa, Homo sapiens; identical to SEQ ID NO: 9930

SEQ ID NO: 9993 - DNA, 668 bp, Homo sapiens
atacgctgggcgcgtcccgggggtcacgtggtgcagagcacgcagagtccttctgtcggttggtcctggagcggcgcagccggagtggggccgtgagatcttattcagggcttctcagcctgaacccccaaccagattaatttctccacagctggaattccaagtgcttggggataatgatacctctgacctttcttccttttgggaagtacttgagtgtgcagctgcatgaggcctcagcaggagagagattttaggtccaagaagctataccagtaggacaaggcaggaaaatactacactttcaggatcaagcccctctgactctcatttggaaactggatgtttgctaagcacctgcttcttaaggatgccgagggatttaatgatactcccagaaacctggagagattaatggggcctatggagaagtgctctgaactcagtgttgggacttgaataaaattaaccattgtcatgttttcagaacaactaagctgttttatatttcatgtgcatgaaagccctagaactaagttgtgttatttccagaaatgaaatagatcccacagttagatgatgtggccattaggaagtaccaaatttataaaaatcactggaggtctgtctgagcagtacctaataaaatatagtatactgaaagtgaa

SEQ ID NO: 9994 - protein, 38 aa, Homo sapiens [sequence omitted]

SEQ ID NO: 9995 - DNA, 579 bp, Homo sapiens
atacgctgggcgcgtcccgggggtcacgtggtgcagagcacgcagagtccttctgtcggttggtcctggagcggcgcagccggagtggggccgtgaggagaataaaggcagccccgttgatgactgaaaatgacaaagcatccacctaacagacgaggaatcagctttgaagtgggagcccagttggaagcccgggaccgtttaaaaaactggtacttttacatttttctgttaattaaagcccttcagtaaaggatttttgccagcactgatagagtggtagcttaggctttttttgtggtgtttttctacttcctgactcttggaagatgtgaggaaatgtcagtcttttctctttgatgcagggatcccagtgtcagggtgactgtcctgtaaccccctgtatatatttgtttcccccttttgcctgttcatctgaaagagttctgggaaaaagaagcaggaatggctacagggaagggaagagttaatagtggcagctctcttgctcctggctgcctgtctgaaaaaagaggaaagatcagggatggaatagtgaagaaaaaggggttcgattgg

SEQ ID NO: 9996 - protein, 43 aa, Homo sapiens
MQGSQCQGDCPVTPCIYLFPPFACSSERVLGKRSRNGYREGKS

SEQ ID NO: 9997 - DNA, 431 bp, Homo sapiens
atacgctgggcgcgtcccgggggtcacgtggtgcagagcacgcagagtccttctgtcggttggtcctggagcggcgcagccggagtggggccgtgaggagaataaaggcagccccgttgatgactgaaaatgacaaagcatccacctaacagacgaggaatcagctttgaagtgggagcccagttggaagcccgggaccgtttaaaaaactgaatacagttgagttttgccaaatttgacagttcacgcaagccccaccacaatcaagatatgggccgggaatggtgactcatgcctataatcccagcaccttgggaggacaacgtgggaggattgcttgagcccaggagttcaagacaagcctaagcaacataatgggacttcgtctctcaaaaaaaaaaaaaaaaaaccataataaaagtaataataat

SEQ ID NO: 9998 - protein, 41 aa, Homo sapiens
YAGRVPGVTWCRARRVLLSVGPGAAQPEWGREENKGSPVDD

SEQ ID NO: 9999 - DNA, 529 bp, Homo sapiens
atacgctgggcgcgtcccgggggtcacgtggtgcagagcacgcagagtccttctgtcggttggtcctggagcggcgcagccggagtggggccgtgaggagaataaaggcagccccgttgatgactgaaaatgacaaagcatccacctaacagacgaggaatcagctttgaagtgggagcccagttggaagcccgggaccgtttaaaaaactgagtgtttcagtggtaatgccgtgtgtttcatattgcatcacatcgggggacacataaagctaggtcgtcccactgttccgtgtatcacttggataagaatacagttgagttttgccaaatttgacagttcacgcaagccccaccacaatcaagatatgggccgggaatggtgactcatgcctataatcccagcaccttgggaggacaacgtgggaggattgcttgagcccaggagttcaagacaagcctaagcaacataatgggacttcgtctctcaaaaaaaaaaaaaaaaaaccataataaaagtaataataata

SEQ ID NO: 10000 - protein, 41 aa, Homo sapiens; identical to SEQ ID NO: 9998

SEQ ID NO: 10001 - DNA, 986 bp, Homo sapiens
atacgctgggcgcgtcccgggggtcacgtggtgcagagcacgcagagtccttctgtcggttggtcctggagcggcgcagccggagtggggccgtgaggagaataaaggcagccccgttgatgactgaaaatgacaaagcatccacctaacagacgaggaatcagctttgaagtgggagcccagttggaagcccgggaccgtttaaaaaactggtatccagctcacatagaagacattgactacgaggaaggaaaagtactcatccatttcaagcgttggaaccatcgttatgatgagtggttctgctgggacagtccttatttacgccctttagagaaaatacagctgaggaaagagggcttgcatgaagaggatggatcttctgaatttcaaataaatgagcaggtccttgcttgctggtctgattgtcgtttttacccggccaaagtcactgctgttaacaaggatggtacttacactgtgaaattttatgatggagtagttcagactgtcaaacatattcatgtcaaagctttttccaaagatcagaatattgtgggtaatgctaggcctaaagaaacagatcacaaaagtctttcatcatctcctgataaacgagagaagtttaaagaacagagaaaagcaacagtgaatgtgaagaaagacaaagaagataaacccttaaagacagaaaagcgacccaagcagcctgataaagaaggaaagttaatctgttctgaaaaggggaaagtgtcagagaaaagtcttcccaagaacgagaaggaagacaaggaaaacatttccgaaaatgacagagagtattctggagatgcccaagtggataagaaacctgaaaatgacattgtgaagagtccacaagaaaacttgagggaacccaaaagaaaacgaggcagacccccttccatagctcctactgctgtggattcaaactctcaaactttgcaaccaataacattggaactgag

SEQ ID NO: 10002 - protein, 284 aa, Homo sapiens
MTKHPPNRRGISFEVGAQLEARDRLKNWYPAHIEDIDYEEGKVLIHFKRWNHRYDEWFCWDSPYLRPLEKIQLRKEGLHEEDGSSEFQINEQVLACWSDCRFYPAKVTAVNKDGTYTVKFYDGVVQTVKHIHVKAFSKDQNIVGNARPKETDHKSLSSSPDKREKFKEQRKATVNVKKDKEDKPLKTEKRPKQPDKEGKLICSEKGKVSEKSLPKNEKEDKENISENDREYSGDAQVDKKPENDIVKSPQENLREPKRKRGRPPSIAPTAVDSNSQTLQPITLE

SEQ ID NO: 10003 - DNA, 1751 bp, Homo sapiens
atacgctgggcgcgtcccgggggtcacgtggtgcagagcacgcagagtccttctgtcggttggtcctggagcggcgcagccggagtggggccgtgaggagaataaaggcagccccgttgatgactgaaaatgacaaagcatccacctaacagacgaggaatcagctttgaagtgggagcccagttggaagcccgggaccgtttaaaaaactggtatccagctcacatagaagacattgactacgaggaaggaaaagtactcatccatttcaagcgttggaaccatcgttatgatgagtggttctgctgggacagtccttatttacgccctttagagaaaatacagctgaggaaagagggcttgcatgaagaggatggatcttctgaatttcaaataaatgagcaggtccttgcttgctggtctgattgtcgtttttacccggccaaagtcactgctgttaacaaggatggtacttacactgtgaaattttatgatggagtagttcagactgtcaaacatattcatgtcaaagctttttccaaagatcagaatattgtgggtaatgctaggcctaaagaaacagatcacaaaagtctttcatcatctcctgataaacgagagaagtttaaagaacagagaaaagcaacagtgaatgtgaagaaagacaaagaagataaacccttaaagacagaaaagcgacccaagcagcctgataaagaaggaaagttaatctgttctgaaaaggggaaagtgtcagagaaaagtcttcccaagaacgagaaggaagacaaggaaaacatttccgaaaatgacagagagtattctggagatgcccaagtggataagaaacctgaaaatgacattgtgaagagtccacaagaaaacttgagggaacccaaaagaaaacgaggcagacccccttccatagctcctactgctgtggattcaaactctcaaactttgcaaccaataacattggaactgagaagaaggaaaatatcaaaaggatgtgaagtcccattaaaacgtcctcggcttgacaaaaattcatcccaggaaaagtcaaaaaactactcggaaaacactgacaaagacttatcgaggagacgttcctccaggctgtccactaatgggacccatgagatcctagatcctgacttggttgtatcagatttggttgatacggatcctttgcaagacacgttgtctagtaccaaggaatctgaagaaggtcagttgaagtctgctttggaagctggccaggtctcatctgcactgacttgccactcctttggggatggatccggggctgcaggcttggagttgaactgcccatcaatgggagaaaacacgatgaaaacagaaccgacttctccccttgtggaattacaagagatttcgactgtggaagtaacaaatacttttaagaaaacagatgattttgggtcatctaatgcaccagctgtcgacctagaccataagtttagatgcaaagttgtggactgtttaaaatttttccgcaaagccaaactgttgcactatcacatgaagtatttccatggaatggagaagtcactggagccagaagagagcccgggaaagaggcatgtccaaaccaggggcccttcagcttcagacaagcccagccaggagaccctgaccaggaagcgggtctctgccagttccccaactacaaaagacaaggaaaagaataaagagaagaaattcaaggagtttgtgagagtgaagcc

SEQ ID NO: 10004 - protein, 539 aa, Homo sapiens
MTKHPPNRRGISFEVGAQLEARDRLKNWYPAHIEDIDYEEGKVLIHFKRWNHRYDEWFCWDSPYLRPLEKIQLRKEGLHEEDGSSEFQINEQVLACWSDCRFYPAKVTAVNKDGTYTVKFYDGVVQTVKHIHVKAFSKDQNIVGNARPKETDHKSLSSSPDKREKFKEQRKATVNVKKDKEDKPLKTEKRPKQPDKEGKLICSEKGKVSEKSLPKNEKEDKENISENDREYSGDAQVDKKPENDIVKSPQENLREPKRKRGRPPSIAPTAVDSNSQTLQPITLELRRRKISKGCEVPLKRPRLDKNSSQEKSKNYSENTDKDLSRRRSSRLSTNGTHEILDPDLVVSDLVDTDPLQDTLSSTKESEEGQLKSALEAGQVSSALTCHSFGDGSGAAGLELNCPSMGENTMKTEPTSPLVELQEISTVEVTNTFKKTDDFGSSNAPAVDLDHKFRCKVVDCLKFFRKAKLLHYHMKYFHGMEKSLEPEESPGKRHVQTRGPSASDKPSQETLTRKRVSASSPTTKDKEKNKEKKFKEFVRV

SEQ ID NO: 10005 - DNA, 6203 bp, Homo sapiens
atacgctgggcgcgtcccgggggtcacgtggtgcagagcacgcagagtccttctgtcggttggtcctggagcggcgcagccggagtggggccgtgaggctggaatgcagtgacatcatctcagagctgactgcaacctctgcctcctggattcaagcaattctcctgcctcagcctcccgagtagctaggattacaggcggatgccaccatgcccggctaatttttgtatttttggaagagatgggttttcaccatattcgccaagctagtcttgaactcctgacctcaagtgatccactctcctcggcctcccaaagtgctaggattacaggccactgtgcctggccaagaggtcacttttcatgtccaggctgcatggagaataaaggcagccccgttgatgactgaaaatgacaaagcatccacctaacagacgaggaatcagctttgaagtgggagcccagttggaagcccgggaccgtttaaaaaactggtatccagctcacatagaagacattgactacgaggaaggaaaagtactcatccatttcaagcgttggaaccatcgttatgatgagtggttctgctgggacagtccttatttacgccctttagagaaaatacagctgaggaaagagggcttgcatgaagaggatggatcttctgaatttcaaataaatgagcaggtccttgcttgctggtctgattgtcgtttttacccggccaaagtcactgctgttaacaaggatggtacttacactgtgaaattttatgatggagtagttcagactgtcaaacatattcatgtcaaagctttttccaaagatcagaatattgtgggtaatgctaggcctaaagaaacagatcacaaaagtctttcatcatctcctgataaacgagagaagtttaaagaacagagaaaagcaacagtgaatgtgaagaaagacaaagaagataaacccttaaagacagaaaagcgacccaagcagcctgataaagaaggaaagttaatctgttctgaaaaggggaaagtgtcagagaaaagtcttcccaagaacgagaaggaagacaaggaaaacatttccgaaaatgacagagagtattctggagatgcccaagtggataagaaacctgaaaatgacattgtgaagagtccacaagaaaacttgagggaacccaaaagaaaacgaggcagacccccttccatagctcctactgctgtggattcaaactctcaaactttgcaaccaataacattggaactgagaagaaggaaaatatcaaaaggatgtgaagtcccattaaaacgtcctcggcttgacaaaaattcatcccaggaaaagtcaaaaaactactcggaaaacactgacaaagacttatcgaggagacgttcctccaggctgtccactaatgggacccatgagatcctagatcctgacttggttgtatcagatttggttgatacggatcctttgcaagacacgttgtctagtaccaaggaatctgaagaaggtcagttgaagtctgctttggaagctggccaggtctcatctgcactgacttgccactcctttggggatggatccggggctgcaggcttggagttgaactgcccatcaatgggagaaaacacgatgaaaacagaaccgacttctccccttgtggaattacaagagatttcgactgtggaagtaacaaatacttttaagaaaacagatgattttgggtcatctaatgcaccagctgtcgacctagaccataagtttagatgcaaagttgtggactgtttaaaatttttccgcaaagccaaactgttgcactatcacatgaagtatttccatggaatggagaagtcactggagccagaagagagcccgggaaagaggcatgtccaaaccaggggcccttcagcttcagacaagcccagccaggagaccctgaccaggaagcgggtctctgccagttccccaactacaaaagacaaggaaaagaataaagagaagaaattcaaggagtttgtgagagtgaagccaaagaagaaaaagaaaaagaaaaagaaaaccaaacctgaatgcccctgcagtgaggagatcagtgacacctcccaggaaccttctccacccaaggcatttgctgttaccaggtgtgggtcctcacacaagccaggggtccatatgagcccgcagcttcatggcccagaatctggacaccacaaagggaaagtgaaagcattggaggaggataatttgagtgagtcctcttctgagagctttctctggagtgatgatgagtatggccaagatgtggatgtgaccaccaacccagatgaggaacttgatggggatgaccgctatgacttcgaggtggtccgctgcatctgtgaggtccaggaggaaaatgacttcatgattcagtgtgaagagtgccagtgctggcagcatggggtctgcatgggattactggaagaaaatgtgcccgagaaatacacctgttatgtttgccaagaccctccaggtcagaggcctggcttcaagtactggtatgacaaggagtggctgagcaggggacatatgcatggcctggcatttctagaagagaactactcccatcagaatgccaagaagatcgtggccacccaccagcttcttggtgatgtgcagagagtgattgaggttctgcatggcctgcagctcaagatgagcatcttgcaaagccgggagcatcctgatctgccgctgtggtgccagccttggaaacagcactcaggggaggggagatctcatttcagaaacatccctgtcactgacaccaggagcaaggaggaagctccaagctatagaactttgaacggggcagtggagaagcccaggcccctggccctgcccctgccgcgttctgtggaggaatcctatatcaccagtgagcattgctaccagaagccccgcgcctattaccctgccgtggagcagaagctggtggtggagacgaggggctctgccctcgacgatgcggtcaaccccctccatgagaacggcgatgattccctttccccgcgcctgggctggcctctagaccaagacaggagcaagggggacagtgaccccaaacccggctccccaaaggtgaaggaatatgtctccaaaaaggccctaccagaagaagcccctgctcggaagctgctggacagaggtggagaggggctgctgagctcccagcaccagtggcagtttaacctgctgacccatgtggaatctcttcaggatgaagttacgcacaggatggactccattgagaaggagttggatgtgttggagagctggctggactacactggggaactggagccccctgagccgctggccaggcttccgcagctcaagcattgtatcaagcagctgctgatggacctgggcaaggtgcagcagatcgccctctgctgctcaacatgaaactgggcacccaaaactcatgggggcacaatcctggggcacctgcaggaggagcttcgcatatttaaataaataaacctagcatgctgaatgcacgtgacaccgactgacttcagggatctgggccaggagtgtggtggacattggacaaagaggccattttggctgcgggaggacactctgatctcgaagcctgccataaaggtagcaaatagactcttgggattcccctcttctgtgcacatcgttgaatgaagagagtctttttgcacaaacttcacttgaaattgtgccactgatgataaacggaatgagagccaaaaaagtttagttggagacagttgtaaattcaatttggagtttatttaattgacttttctatcacgttggggcacatgccaactccctggtttcttcctggcatggtgtttgggcagcaggcatcattttccttttctagcttcataggaatattgtgagctcaccatgctgtggaggttgggaaagagcagagtcttggctgccctgctttctccttaggactcttcacttttctcaccacatctcttgcatgacttcatggtactggggacaagtttgtatgccttcaccccagagctggctgggttatggcttttgtagcagagcccatacagcctatggaagaactagaatctcactcacagtaataagaatctaggaggaattccaaaccgaagcaggcagggtctggaacccaaaggacagcattttctacccacttcttaatattgacagcttccccgttctatttaatgtccaaaaatgtttcccaaaatttcaaactctttcactgtaaagatttgttacaaagaatgtggtttggggaattaccttattttatattgttgtaaacaaacttcaaattctacatgtgcgacttttctccttcctgaagggtgtttagtagtcagcgttttcagaattgttttgttactatactttaacattttacatttcctgtttgtattattttgtgagagcaaggtgatcatgctgcttaaggtccaggtacaacctatttgtaccttttgagacaatatttgtgttacttttgcaggttacggttccacatgtaattgctatattttgttttgtttttccttactaggcaaagttaaaatgttccatgctttgaggagtgacccatttcactactttgttttcttatcactaaaggcaaaaatcaaagcacagttgtccattaacacttataagttaattatgggtttatgagtctgtaatgttatatgctgcaaacatttactatgtaaacgtgaagtagccaataatatctcaatagtagtaacagtatctttagcgacctttggaatagttaagcacaggtcattgtggacatgaattcaggcctctgtactaaaatctatttcagggaatgttctgtctagtgatttgctcaccatttgatatataatgaattataggacaagtataagctgatctgctatagctgtccatcagagagaatacacgtggctataacatctataacaaaacgacgattcctctacaagaggctgtttctcactgctaacgttggtgtttctggcgtgggaagaaatgcacaggcgtgcatggcatgcacgttcagacagctgcattgtaagagttctgtcatgcagtctgaaaagggaagaaacaggatggctttctgtagccacacctgtgaggcgtgatgattgttgtattattagattactgatttttcttttctgaaaatacatttgagttttaatcacatctgtggaagctgtaacttttaaggtagtcaatttcatgtcttgttcaacgatgtaagcagaaactgaattgccctaattttgccaactggccattattgggattattgtttaaatttttggtaaaggaagtaatctcctttcattcattgtgacttttgttcttagggaagcagagaagactccccaagttcttataacctcattgtgcttccctaatttaaagccatgttgaggggctccattcccaattcctgggtcaaggtgaattaaccctatgttggagcactggaaaccgttatttgcaaacattgctgttaccatttagaaatatgtgcactatcagctgggtgcagtggctcacgtctgtaatcccagcactttgggaggccgaggcaggtggatcacctgaggtcaggagttcgagaccagcctggccaacagggtgaaaccccgtctctactaaaagtacaaaaattagctgggcgtggtggcggacgcctgtaatctcagctacttgggaggctgaagcaggagaggtgctggaacctgggaggcggaggttgaagtgagccgagattgcgctattgcactccagctcgggcgacaactgcaagactccatctcaaaaaaataaaaataaaagaaaagaaagaaatatgtgcactacctaagttttgtctttagaaaaactatccacctataaaaaattaccttgacaaaaatagttccggtttgactaatcattttgtttctttaagtggtaagtgtatgcaaggtggatccttgatgagccaacattgcactgtggatacatatctatgtttacgcgctattagaacagaaggcgctgtatatagaaatgttgctttgaagcaatatttgcaaaacacgcagacttctgtatctgtatttggaaaaaataaaacaggttcttgttgctatgtttcagtt

SEQ ID NO: 10006 - protein, 1012 aa, Homo sapiens; identical to SEQ ID NO: 1253

SEQ ID NO: 10007 - DNA, 5921 bp, Homo sapiens
atacgctgggcgcgtcccgggggtcacgtggtgcagagcacgcagagtccttctgtcggttggtcctggagcggcgcagccggagtggggccgtgaggagaataaaggcagccccgttgatgactgaaaatgacaaagcatccacctaacagacgaggaatcagctttgaagtgggagcccagttggaagcccgggaccgtttaaaaaactggtatccagctcacatagaagacattgactacgaggaaggaaaagtactcatccatttcaagcgttggaaccatcgttatgatgagtggttctgctgggacagtccttatttacgccctttagagaaaatacagctgaggaaagagggcttgcatgaagaggatggatcttctgaatttcaaataaatgagcaggtccttgcttgctggtctgattgtcgtttttacccggccaaagtcactgctgttaacaaggatggtacttacactgtgaaattttatgatggagtagttcagactgtcaaacatattcatgtcaaagctttttccaaagatcagaatattgtgggtaatgctaggcctaaagaaacagatcacaaaagtctttcatcatctcctgataaacgagagaagtttaaagaacagagaaaagcaacagtgaatgtgaagaaagacaaagaagataaacccttaaagacagaaaagcgacccaagcagcctgataaagaaggaaagttaatctgttctgaaaaggggaaagtgtcagagaaaagtcttcccaagaacgagaaggaagacaaggaaaacatttccgaaaatgacagagagtattctggagatgcccaagtggataagaaacctgaaaatgacattgtgaagagtccacaagaaaacttgagggaacccaaaagaaaacgaggcagacccccttccatagctcctactgctgtggattcaaactctcaaactttgcaaccaataacattggaactgagaagaaggaaaatatcaaaaggatgtgaagtcccattaaaacgtcctcggcttgacaaaaattcatcccaggaaaagtcaaaaaactactcggaaaacactgacaaagacttatcgaggagacgttcctccaggctgtccactaatgggacccatgagatcctagatcctgacttggttgtatcagatttggttgatacggatcctttgcaagacacgttgtctagtaccaaggaatctgaagaaggtcagttgaagtctgctttggaagctggccaggtctcatctgcactgacttgccactcctttggggatggatccggggctgcaggcttggagttgaactgcccatcaatgggagaaaacacgatgaaaacagaaccgacttctccccttgtggaattacaagagatttcgactgtggaagtaacaaatacttttaagaaaacagatgattttgggtcatctaatgcaccagctgtcgacctagaccataagtttagatgcaaagttgtggactgtttaaaatttttccgcaaagccaaactgttgcactatcacatgaagtatttccatggaatggagaagtcactggagccagaagagagcccgggaaagaggcatgtccaaaccaggggcccttcagcttcagacaagcccagccaggagaccctgaccaggaagcgggtctctgccagttccccaactacaaaagacaaggaaaagaataaagagaagaaattcaaggagtttgtgagagtgaagccaaagaagaaaaagaaaaagaaaaagaaaaccaaacctgaatgcccctgcagtgaggagatcagtgacacctcccaggaaccttctccacccaaggcatttgctgttaccaggtgtgggtcctcacacaagccaggggtccatatgagcccgcagcttcatggcccagaatctggacaccacaaagggaaagtgaaagcattggaggaggataatttgagtgagtcctcttctgagagctttctctggagtgatgatgagtatggccaagatgtggatgtgaccaccaacccagatgaggaacttgatggggatgaccgctatgacttcgaggtggtccgctgcatctgtgaggtccaggaggaaaatgacttcatgattcagtgtgaagagtgccagtgctggcagcatggggtctgcatgggattactggaagaaaatgtgcccgagaaatacacctgttatgtttgccaagaccctccaggtcagaggcctggcttcaagtactggtatgacaaggagtggctgagcaggggacatatgcatggcctggcatttctagaagagaactactcccatcagaatgccaagaagatcgtggccacccaccagcttcttggtgatgtgcagagagtgattgaggttctgcatggcctgcagctcaagatgagcatcttgcaaagccgggagcatcctgatctgccgctgtggtgccagccttggaaacagcactcaggggaggggagatctcatttcagaaacatccctgtcactgacaccaggagcaaggaggaagctccaagctatagaactttgaacggggcagtggagaagcccaggcccctggccctgcccctgccgcgttctgtggaggaatcctatatcaccagtgagcattgctaccagaagccccgcgcctattaccctgccgtggagcagaagctggtggtggagacgaggggctctgccctcgacgatgcggtcaaccccctccatgagaacggcgatgattccctttccccgcgcctgggctggcctctagaccaagacaggagcaagggggacagtgaccccaaacccggctccccaaaggtgaaggaatatgtctccaaaaaggccctaccagaagaagcccctgctcggaagctgctggacagaggtggagaggggctgctgagctcccagcaccagtggcagtttaacctgctgacccatgtggaatctcttcaggatgaagttacgcacaggatggactccattgagaaggagttggatgtgttggagagctggctggactacactggggaactggagccccctgagccgctggccaggcttccgcagctcaagcattgtatcaagcagctgctgatggacctgggcaaggtgcagcagatcgccctctgctgctcaacatgaaactgggcacccaaaactcatgggggcacaatcctggggcacctgcaggaggagcttcgcatatttaaataaataaacctagcatgctgaatgcacgtgacaccgactgacttcagggatctgggccaggagtgtggtggacattggacaaagaggccattttggctgcgggaggacactctgatctcgaagcctgccataaaggtagcaaatagactcttgggattcccctcttctgtgcacatcgttgaatgaagagagtctttttgcacaaacttcacttgaaattgtgccactgatgataaacggaatgagagccaaaaaagtttagttggagacagttgtaaattcaatttggagtttatttaattgacttttctatcacgttggggcacatgccaactccctggtttcttcctggcatggtgtttgggcagcaggcatcattttccttttctagcttcataggaatattgtgagctcaccatgctgtggaggttgggaaagagcagagtcttggctgccctgctttctccttaggactcttcacttttctcaccacatctcttgcatgacttcatggtactggggacaagtttgtatgccttcaccccagagctggctgggttatggcttttgtagcagagcccatacagcctatggaagaactagaatctcactcacagtaataagaatctaggaggaattccaaaccgaagcaggcagggtctggaacccaaaggacagcattttctacccacttcttaatattgacagcttccccgttctatttaatgtccaaaaatgtttcccaaaatttcaaactctttcactgtaaagatttgttacaaagaatgtggtttggggaattaccttattttatattgttgtaaacaaacttcaaattctacatgtgcgacttttctccttcctgaagggtgtttagtagtcagcgttttcagaattgttttgttactatactttaacattttacatttcctgtttgtattattttgtgagagcaaggtgatcatgctgcttaaggtccaggtacaacctatttgtaccttttgagacaatatttgtgttacttttgcaggttacggttccacatgtaattgctatattttgttttgtttttccttactaggcaaagttaaaatgttccatgctttgaggagtgacccatttcactactttgttttcttatcactaaaggcaaaaatcaaagcacagttgtccattaacacttataagttaattatgggtttatgagtctgtaatgttatatgctgcaaacatttactatgtaaacgtgaagtagccaataatatctcaatagtagtaacagtatctttagcgacctttggaatagttaagcacaggtcattgtggacatgaattcaggcctctgtactaaaatctatttcagggaatgttctgtctagtgatttgctcaccatttgatatataatgaattataggacaagtataagctgatctgctatagctgtccatcagagagaatacacgtggctataacatctataacaaaacgacgattcctctacaagaggctgtttctcactgctaacgttggtgtttctggcgtgggaagaaatgcacaggcgtgcatggcatgcacgttcagacagctgcattgtaagagttctgtcatgcagtctgaaaagggaagaaacaggatggctttctgtagccacacctgtgaggcgtgatgattgttgtattattagattactgatttttcttttctgaaaatacatttgagttttaatcacatctgtggaagctgtaacttttaaggtagtcaatttcatgtcttgttcaacgatgtaagcagaaactgaattgccctaattttgccaactggccattattgggattattgtttaaatttttggtaaaggaagtaatctcctttcattcattgtgacttttgttcttagggaagcagagaagactccccaagttcttataacctcattgtgcttccctaatttaaagccatgttgaggggctccattcccaattcctgggtcaaggtgaattaaccctatgttggagcactggaaaccgttatttgcaaacattgctgttaccatttagaaatatgtgcactatcagctgggtgcagtggctcacgtctgtaatcccagcactttgggaggccgaggcaggtggatcacctgaggtcaggagttcgagaccagcctggccaacagggtgaaaccccgtctctactaaaagtacaaaaattagctgggcgtggtggcggacgcctgtaatctcagctacttgggaggctgaagcaggagaggtgctggaacctgggaggcggaggttgaagtgagccgagattgcgctattgcactccagctcgggcgacaactgcaagactccatctcaaaaaaataaaaataaaagaaaagaaagaaatatgtgcactacctaagttttgtctttagaaaaactatccacctataaaaaattaccttgacaaaaatagttccggtttgactaatcattttgtttctttaagtggtaagtgtatgcaaggtggatccttgatgagccaacattgcactgtggatacatatctatgtttacgcgctattagaacagaaggcgctgtatatagaaatgttgctttgaagcaatatttgcaaaacacgcagacttctgtatctgtatttggaaaaaataaaacaggttcttgttgctatgtttcagtt

SEQ ID NO: 10008 - protein, 1012 aa, Homo sapiens; identical to SEQ ID NO: 1253

SEQ ID NO: 10009 - DNA, 6001 bp, Homo sapiens
atacgctgggcgcgtcccgggggtcacgtggtgcagagcacgcagagtccttctgtcggttggtcctggagcggcgcagccggagtggggccgtgagcacgagtacacgagacaggattgagaaaggagagattcaaattgtgacttcagattcaaaggcaattaaaggaattaaacgagaataaaggcagccccgttgatgactgaaaatgacaaagcatccacctaacagacgaggaatcagctttgaagtgggagcccagttggaagcccgggaccgtttaaaaaactggtatccagctcacatagaagacattgactacgaggaaggaaaagtactcatccatttcaagcgttggaaccatcgttatgatgagtggttctgctgggacagtccttatttacgccctttagagaaaatacagctgaggaaagagggcttgcatgaagaggatggatcttctgaatttcaaataaatgagcaggtccttgcttgctggtctgattgtcgtttttacccggccaaagtcactgctgttaacaaggatggtacttacactgtgaaattttatgatggagtagttcagactgtcaaacatattcatgtcaaagctttttccaaagatcagaatattgtgggtaatgctaggcctaaagaaacagatcacaaaagtctttcatcatctcctgataaacgagagaagtttaaagaacagagaaaagcaacagtgaatgtgaagaaagacaaagaagataaacccttaaagacagaaaagcgacccaagcagcctgataaagaaggaaagttaatctgttctgaaaaggggaaagtgtcagagaaaagtcttcccaagaacgagaaggaagacaaggaaaacatttccgaaaatgacagagagtattctggagatgcccaagtggataagaaacctgaaaatgacattgtgaagagtccacaagaaaacttgagggaacccaaaagaaaacgaggcagacccccttccatagctcctactgctgtggattcaaactctcaaactttgcaaccaataacattggaactgagaagaaggaaaatatcaaaaggatgtgaagtcccattaaaacgtcctcggcttgacaaaaattcatcccaggaaaagtcaaaaaactactcggaaaacactgacaaagacttatcgaggagacgttcctccaggctgtccactaatgggacccatgagatcctagatcctgacttggttgtatcagatttggttgatacggatcctttgcaagacacgttgtctagtaccaaggaatctgaagaaggtcagttgaagtctgctttggaagctggccaggtctcatctgcactgacttgccactcctttggggatggatccggggctgcaggcttggagttgaactgcccatcaatgggagaaaacacgatgaaaacagaaccgacttctccccttgtggaattacaagagatttcgactgtggaagtaacaaatacttttaagaaaacagatgattttgggtcatctaatgcaccagctgtcgacctagaccataagtttagatgcaaagttgtggactgtttaaaatttttccgcaaagccaaactgttgcactatcacatgaagtatttccatggaatggagaagtcactggagccagaagagagcccgggaaagaggcatgtccaaaccaggggcccttcagcttcagacaagcccagccaggagaccctgaccaggaagcgggtctctgccagttccccaactacaaaagacaaggaaaagaataaagagaagaaattcaaggagtttgtgagagtgaagccaaagaagaaaaagaaaaagaaaaagaaaaccaaacctgaatgcccctgcagtgaggagatcagtgacacctcccaggaaccttctccacccaaggcatttgctgttaccaggtgtgggtcctcacacaagccaggggtccatatgagcccgcagcttcatggcccagaatctggacaccacaaagggaaagtgaaagcattggaggaggataatttgagtgagtcctcttctgagagctttctctggagtgatgatgagtatggccaagatgtggatgtgaccaccaacccagatgaggaacttgatggggatgaccgctatgacttcgaggtggtccgctgcatctgtgaggtccaggaggaaaatgacttcatgattcagtgtgaagagtgccagtgctggcagcatggggtctgcatgggattactggaagaaaatgtgcccgagaaatacacctgttatgtttgccaagaccctccaggtcagaggcctggcttcaagtactggtatgacaaggagtggctgagcaggggacatatgcatggcctggcatttctagaagagaactactcccatcagaatgccaagaagatcgtggccacccaccagcttcttggtgatgtgcagagagtgattgaggttctgcatggcctgcagctcaagatgagcatcttgcaaagccgggagcatcctgatctgccgctgtggtgccagccttggaaacagcactcaggggaggggagatctcatttcagaaacatccctgtcactgacaccaggagcaaggaggaagctccaagctatagaactttgaacggggcagtggagaagcccaggcccctggccctgcccctgccgcgttctgtggaggaatcctatatcaccagtgagcattgctaccagaagccccgcgcctattaccctgccgtggagcagaagctggtggtggagacgaggggctctgccctcgacgatgcggtcaaccccctccatgagaacggcgatgattccctttccccgcgcctgggctggcctctagaccaagacaggagcaagggggacagtgaccccaaacccggctccccaaaggtgaaggaatatgtctccaaaaaggccctaccagaagaagcccctgctcggaagctgctggacagaggtggagaggggctgctgagctcccagcaccagtggcagtttaacctgctgacccatgtggaatctcttcaggatgaagttacgcacaggatggactccattgagaaggagttggatgtgttggagagctggctggactacactggggaactggagccccctgagccgctggccaggcttccgcagctcaagcattgtatcaagcagctgctgatggacctgggcaaggtgcagcagatcgccctctgctgctcaacatgaaactgggcacccaaaactcatgggggcacaatcctggggcacctgcaggaggagcttcgcatatttaaataaataaacctagcatgctgaatgcacgtgacaccgactgacttcagggatctgggccaggagtgtggtggacattggacaaagaggccattttggctgcgggaggacactctgatctcgaagcctgccataaaggtagcaaatagactcttgggattcccctcttctgtgcacatcgttgaatgaagagagtctttttgcacaaacttcacttgaaattgtgccactgatgataaacggaatgagagccaaaaaagtttagttggagacagttgtaaattcaatttggagtttatttaattgacttttctatcacgttggggcacatgccaactccctggtttcttcctggcatggtgtttgggcagcaggcatcattttccttttctagcttcataggaatattgtgagctcaccatgctgtggaggttgggaaagagcagagtcttggctgccctgctttctccttaggactcttcacttttctcaccacatctcttgcatgacttcatggtactggggacaagtttgtatgccttcaccccagagctggctgggttatggcttttgtagcagagcccatacagcctatggaagaactagaatctcactcacagtaataagaatctaggaggaattccaaaccgaagcaggcagggtctggaacccaaaggacagcattttctacccacttcttaatattgacagcttccccgttctatttaatgtccaaaaatgtttcccaaaatttcaaactctttcactgtaaagatttgttacaaagaatgtggtttggggaattaccttattttatattgttgtaaacaaacttcaaattctacatgtgcgacttttctccttcctgaagggtgtttagtagtcagcgttttcagaattgttttgttactatactttaacattttacatttcctgtttgtattattttgtgagagcaaggtgatcatgctgcttaaggtccaggtacaacctatttgtaccttttgagacaatatttgtgttacttttgcaggttacggttccacatgtaattgctatattttgttttgtttttccttactaggcaaagttaaaatgttccatgctttgaggagtgacccatttcactactttgttttcttatcactaaaggcaaaaatcaaagcacagttgtccattaacacttataagttaattatgggtttatgagtctgtaatgttatatgctgcaaacatttactatgtaaacgtgaagtagccaataatatctcaatagtagtaacagtatctttagcgacctttggaatagttaagcacaggtcattgtggacatgaattcaggcctctgtactaaaatctatttcagggaatgttctgtctagtgatttgctcaccatttgatatataatgaattataggacaagtataagctgatctgctatagctgtccatcagagagaatacacgtggctataacatctataacaaaacgacgattcctctacaagaggctgtttctcactgctaacgttggtgtttctggcgtgggaagaaatgcacaggcgtgcatggcatgcacgttcagacagctgcattgtaagagttctgtcatgcagtctgaaaagggaagaaacaggatggctttctgtagccacacctgtgaggcgtgatgattgttgtattattagattactgatttttcttttctgaaaatacatttgagttttaatcacatctgtggaagctgtaacttttaaggtagtcaatttcatgtcttgttcaacgatgtaagcagaaactgaattgccctaattttgccaactggccattattgggattattgtttaaatttttggtaaaggaagtaatctcctttcattcattgtgacttttgttcttagggaagcagagaagactccccaagttcttataacctcattgtgcttccctaatttaaagccatgttgaggggctccattcccaattcctgggtcaaggtgaattaaccctatgttggagcactggaaaccgttatttgcaaacattgctgttaccatttagaaatatgtgcactatcagctgggtgcagtggctcacgtctgtaatcccagcactttgggaggccgaggcaggtggatcacctgaggtcaggagttcgagaccagcctggccaacagggtgaaaccccgtctctactaaaagtacaaaaattagctgggcgtggtggcggacgcctgtaatctcagctacttgggaggctgaagcaggagaggtgctggaacctgggaggcggaggttgaagtgagccgagattgcgctattgcactccagctcgggcgacaactgcaagactccatctcaaaaaaataaaaataaaagaaaagaaagaaatatgtgcactacctaagttttgtctttagaaaaactatccacctataaaaaattaccttgacaaaaatagttccggtttgactaatcattttgtttctttaagtggtaagtgtatgcaaggtggatccttgatgagccaacattgcactgtggatacatatctatgtttacgcgctattagaacagaaggcgctgtatatagaaatgttgctttgaagcaatatttgcaaaacacgcagacttctgtatctgtatttggaaaaaataaaacaggttcttgttgctatgtttcagtt

SEQ ID NO: 10010 - protein, 1012 aa, Homo sapiens; identical to SEQ ID NO: 1253

SEQ ID NO: 10011 - DNA, 6059 bp, Homo sapiens
atacgctgggcgcgtcccgggggtcacgtggtgcagagcacgcagagtccttctgtcggttggtcctggagcggcgcagccggagtggggccgtgaggcggagtctcactctgtcgcccagaagtgcagtggtgcaacctcggcacactgcaacctctgtctcctgggttcaagcaattctcctgcctcagcctcctgagtagctgggattacaggtgcccgccaccatgcctgggagaataaaggcagccccgttgatgactgaaaatgacaaagcatccacctaacagacgaggaatcagctttgaagtgggagcccagttggaagcccgggaccgtttaaaaaactggtatccagctcacatagaagacattgactacgaggaaggaaaagtactcatccatttcaagcgttggaaccatcgttatgatgagtggttctgctgggacagtccttatttacgccctttagagaaaatacagctgaggaaagagggcttgcatgaagaggatggatcttctgaatttcaaataaatgagcaggtccttgcttgctggtctgattgtcgtttttacccggccaaagtcactgctgttaacaaggatggtacttacactgtgaaattttatgatggagtagttcagactgtcaaacatattcatgtcaaagctttttccaaagatcagaatattgtgggtaatgctaggcctaaagaaacagatcacaaaagtctttcatcatctcctgataaacgagagaagtttaaagaacagagaaaagcaacagtgaatgtgaagaaagacaaagaagataaacccttaaagacagaaaagcgacccaagcagcctgataaagaaggaaagttaatctgttctgaaaaggggaaagtgtcagagaaaagtcttcccaagaacgagaaggaagacaaggaaaacatttccgaaaatgacagagagtattctggagatgcccaagtggataagaaacctgaaaatgacattgtgaagagtccacaagaaaacttgagggaacccaaaagaaaacgaggcagacccccttccatagctcctactgctgtggattcaaactctcaaactttgcaaccaataacattggaactgagaagaaggaaaatatcaaaaggatgtgaagtcccattaaaacgtcctcggcttgacaaaaattcatcccaggaaaagtcaaaaaactactcggaaaacactgacaaagacttatcgaggagacgttcctccaggctgtccactaatgggacccatgagatcctagatcctgacttggttgtatcagatttggttgatacggatcctttgcaagacacgttgtctagtaccaaggaatctgaagaaggtcagttgaagtctgctttggaagctggccaggtctcatctgcactgacttgccactcctttggggatggatccggggctgcaggcttggagttgaactgcccatcaatgggagaaaacacgatgaaaacagaaccgacttctccccttgtggaattacaagagatttcgactgtggaagtaacaaatacttttaagaaaacagatgattttgggtcatctaatgcaccagctgtcgacctagaccataagtttagatgcaaagttgtggactgtttaaaatttttccgcaaagccaaactgttgcactatcacatgaagtatttccatggaatggagaagtcactggagccagaagagagcccgggaaagaggcatgtccaaaccaggggcccttcagcttcagacaagcccagccaggagaccctgaccaggaagcgggtctctgccagttccccaactacaaaagacaaggaaaagaataaagagaagaaattcaaggagtttgtgagagtgaagccaaagaagaaaaagaaaaagaaaaagaaaaccaaacctgaatgcccctgcagtgaggagatcagtgacacctcccaggaaccttctccacccaaggcatttgctgttaccaggtgtgggtcctcacacaagccaggggtccatatgagcccgcagcttcatggcccagaatctggacaccacaaagggaaagtgaaagcattggaggaggataatttgagtgagtcctcttctgagagctttctctggagtgatgatgagtatggccaagatgtggatgtgaccaccaacccagatgaggaacttgatggggatgaccgctatgacttcgaggtggtccgctgcatctgtgaggtccaggaggaaaatgacttcatgattcagtgtgaagagtgccagtgctggcagcatggggtctgcatgggattactggaagaaaatgtgcccgagaaatacacctgttatgtttgccaagaccctccaggtcagaggcctggcttcaagtactggtatgacaaggagtggctgagcaggggacatatgcatggcctggcatttctagaagagaactactcccatcagaatgccaagaagatcgtggccacccaccagcttcttggtgatgtgcagagagtgattgaggttctgcatggcctgcagctcaagatgagcatcttgcaaagccgggagcatcctgatctgccgctgtggtgccagccttggaaacagcactcaggggaggggagatctcatttcagaaacatccctgtcactgacaccaggagcaaggaggaagctccaagctatagaactttgaacggggcagtggagaagcccaggcccctggccctgcccctgccgcgttctgtggaggaatcctatatcaccagtgagcattgctaccagaagccccgcgcctattaccctgccgtggagcagaagctggtggtggagacgaggggctctgccctcgacgatgcggtcaaccccctccatgagaacggcgatgattccctttccccgcgcctgggctggcctctagaccaagacaggagcaagggggacagtgaccccaaacccggctccccaaaggtgaaggaatatgtctccaaaaaggccctaccagaagaagcccctgctcggaagctgctggacagaggtggagaggggctgctgagctcccagcaccagtggcagtttaacctgctgacccatgtggaatctcttcaggatgaagttacgcacaggatggactccattgagaaggagttggatgtgttggagagctggctggactacactggggaactggagccccctgagccgctggccaggcttccgcagctcaagcattgtatcaagcagctgctgatggacctgggcaaggtgcagcagatcgccctctgctgctcaacatgaaactgggcacccaaaactcatgggggcacaatcctggggcacctgcaggaggagcttcgcatatttaaataaataaacctagcatgctgaatgcacgtgacaccgactgacttcagggatctgggccaggagtgtggtggacattggacaaagaggccattttggctgcgggaggacactctgatctcgaagcctgccataaaggtagcaaatagactcttgggattcccctcttctgtgcacatcgttgaatgaagagagtctttttgcacaaacttcacttgaaattgtgccactgatgataaacggaatgagagccaaaaaagtttagttggagacagttgtaaattcaatttggagtttatttaattgacttttctatcacgttggggcacatgccaactccctggtttcttcctggcatggtgtttgggcagcaggcatcattttccttttctagcttcataggaatattgtgagctcaccatgctgtggaggttgggaaagagcagagtcttggctgccctgctttctccttaggactcttcacttttctcaccacatctcttgcatgacttcatggtactggggacaagtttgtatgccttcaccccagagctggctgggttatggcttttgtagcagagcccatacagcctatggaagaactagaatctcactcacagtaataagaatctaggaggaattccaaaccgaagcaggcagggtctggaacccaaaggacagcattttctacccacttcttaatattgacagcttccccgttctatttaatgtccaaaaatgtttcccaaaatttcaaactctttcactgtaaagatttgttacaaagaatgtggtttggggaattaccttattttatattgttgtaaacaaacttcaaattctacatgtgcgacttttctccttcctgaagggtgtttagtagtcagcgttttcagaattgttttgttactatactttaacattttacatttcctgtttgtattattttgtgagagcaaggtgatcatgctgcttaaggtccaggtacaacctatttgtaccttttgagacaatatttgtgttacttttgcaggttacggttccacatgtaattgctatattttgttttgtttttccttactaggcaaagttaaaatgttccatgctttgaggagtgacccatttcactactttgttttcttatcactaaaggcaaaaatcaaagcacagttgtccattaacacttataagttaattatgggtttatgagtctgtaatgttatatgctgcaaacatttactatgtaaacgtgaagtagccaataatatctcaatagtagtaacagtatctttagcgacctttggaatagttaagcacaggtcattgtggacatgaattcaggcctctgtactaaaatctatttcagggaatgttctgtctagtgatttgctcaccatttgatatataatgaattataggacaagtataagctgatctgctatagctgtccatcagagagaatacacgtggctataacatctataacaaaacgacgattcctctacaagaggctgtttctcactgctaacgttggtgtttctggcgtgggaagaaatgcacaggcgtgcatggcatgcacgttcagacagctgcattgtaagagttctgtcatgcagtctgaaaagggaagaaacaggatggctttctgtagccacacctgtgaggcgtgatgattgttgtattattagattactgatttttcttttctgaaaatacatttgagttttaatcacatctgtggaagctgtaacttttaaggtagtcaatttcatgtcttgttcaacgatgtaagcagaaactgaattgccctaattttgccaactggccattattgggattattgtttaaatttttggtaaaggaagtaatctcctttcattcattgtgacttttgttcttagggaagcagagaagactccccaagttcttataacctcattgtgcttccctaatttaaagccatgttgaggggctccattcccaattcctgggtcaaggtgaattaaccctatgttggagcactggaaaccgttatttgcaaacattgctgttaccatttagaaatatgtgcactatcagctgggtgcagtggctcacgtctgtaatcccagcactttgggaggccgaggcaggtggatcacctgaggtcaggagttcgagaccagcctggccaacagggtgaaaccccgtctctactaaaagtacaaaaattagctgggcgtggtggcggacgcctgtaatctcagctacttgggaggctgaagcaggagaggtgctggaacctgggaggcggaggttgaagtgagccgagattgcgctattgcactccagctcgggcgacaactgcaagactccatctcaaaaaaataaaaataaaagaaaagaaagaaatatgtgcactacctaagttttgtctttagaaaaactatccacctataaaaaattaccttgacaaaaatagttccggtttgactaatcattttgtttctttaagtggtaagtgtatgcaaggtggatccttgatgagccaacattgcactgtggatacatatctatgtttacgcgctattagaacagaaggcgctgtatatagaaatgttgctttgaagcaatatttgcaaaacacgcagacttctgtatctgtatttggaaaaaataaaacaggttcttgttgctatgtttcagtt

SEQ ID NO: 10012 - protein, 1012 aa, Homo sapiens; identical to SEQ ID NO: 1253

SEQ ID NO: 10013 - DNA, 5950 bp, Homo sapiens
tgaggtggagtctcacttcgttgcccaggctagagtacaatggtgcaatctcggctcactgcaacctctgcctcccggattcaagtgattctcctgcttcagcctcccaagtagctggtactacaggagaataaaggcagccccgttgatgactgaaaatgacaaagcatccacctaacagacgaggaatcagctttgaagtgggagcccagttggaagcccgggaccgtttaaaaaactggtatccagctcacatagaagacattgactacgaggaaggaaaagtactcatccatttcaagcgttggaaccatcgttatgatgagtggttctgctgggacagtccttatttacgccctttagagaaaatacagctgaggaaagagggcttgcatgaagaggatggatcttctgaatttcaaataaatgagcaggtccttgcttgctggtctgattgtcgtttttacccggccaaagtcactgctgttaacaaggatggtacttacactgtgaaattttatgatggagtagttcagactgtcaaacatattcatgtcaaagctttttccaaagatcagaatattgtgggtaatgctaggcctaaagaaacagatcacaaaagtctttcatcatctcctgataaacgagagaagtttaaagaacagagaaaagcaacagtgaatgtgaagaaagacaaagaagataaacccttaaagacagaaaagcgacccaagcagcctgataaagaaggaaagttaatctgttctgaaaaggggaaagtgtcagagaaaagtcttcccaagaacgagaaggaagacaaggaaaacatttccgaaaatgacagagagtattctggagatgcccaagtggataagaaacctgaaaatgacattgtgaagagtccacaagaaaacttgagggaacccaaaagaaaacgaggcagacccccttccatagctcctactgctgtggattcaaactctcaaactttgcaaccaataacattggaactgagaagaaggaaaatatcaaaaggatgtgaagtcccattaaaacgtcctcggcttgacaaaaattcatcccaggaaaagtcaaaaaactactcggaaaacactgacaaagacttatcgaggagacgttcctccaggctgtccactaatgggacccatgagatcctagatcctgacttggttgtatcagatttggttgatacggatcctttgcaagacacgttgtctagtaccaaggaatctgaagaaggtcagttgaagtctgctttggaagctggccaggtctcatctgcactgacttgccactcctttggggatggatccggggctgcaggcttggagttgaactgcccatcaatgggagaaaacacgatgaaaacagaaccgacttctccccttgtggaattacaagagatttcgactgtggaagtaacaaatacttttaagaaaacagatgattttgggtcatctaatgcaccagctgtcgacctagaccataagtttagatgcaaagttgtggactgtttaaaatttttccgcaaagccaaactgttgcactatcacatgaagtatttccatggaatggagaagtcactggagccagaagagagcccgggaaagaggcatgtccaaaccaggggcccttcagcttcagacaagcccagccaggagaccctgaccaggaagcgggtctctgccagttccccaactacaaaagacaaggaaaagaataaagagaagaaattcaaggagtttgtgagagtgaagccaaagaagaaaaagaaaaagaaaaagaaaaccaaacctgaatgcccctgcagtgaggagatcagtgacacctcccaggaaccttctccacccaaggcatttgctgttaccaggtgtgggtcctcacacaagccaggggtccatatgagcccgcagcttcatggcccagaatctggacaccacaaagggaaagtgaaagcattggaggaggataatttgagtgagtcctcttctgagagctttctctggagtgatgatgagtatggccaagatgtggatgtgaccaccaacccagatgaggaacttgatggggatgaccgctatgacttcgaggtggtccgctgcatctgtgaggtccaggaggaaaatgacttcatgattcagtgtgaagagtgccagtgctggcagcatggggtctgcatgggattactggaagaaaatgtgcccgagaaatacacctgttatgtttgccaagaccctccaggtcagaggcctggcttcaagtactggtatgacaaggagtggctgagcaggggacatatgcatggcctggcatttctagaagagaactactcccatcagaatgccaagaagatcgtggccacccaccagcttcttggtgatgtgcagagagtgattgaggttctgcatggcctgcagctcaagatgagcatcttgcaaagccgggagcatcctgatctgccgctgtggtgccagccttggaaacagcactcaggggaggggagatctcatttcagaaacatccctgtcactgacaccaggagcaaggaggaagctccaagctatagaactttgaacggggcagtggagaagcccaggcccctggccctgcccctgccgcgttctgtggaggaatcctatatcaccagtgagcattgctaccagaagccccgcgcctattaccctgccgtggagcagaagctggtggtggagacgaggggctctgccctcgacgatgcggtcaaccccctccatgagaacggcgatgattccctttccccgcgcctgggctggcctctagaccaagacaggagcaagggggacagtgaccccaaacccggctccccaaaggtgaaggaatatgtctccaaaaaggccctaccagaagaagcccctgctcggaagctgctggacagaggtggagaggggctgctgagctcccagcaccagtggcagtttaacctgctgacccatgtggaatctcttcaggatgaagttacgcacaggatggactccattgagaaggagttggatgtgttggagagctggctggactacactggggaactggagccccctgagccgctggccaggcttccgcagctcaagcattgtatcaagcagctgctgatggacctgggcaaggtgcagcagatcgccctctgctgctcaacatgaaactgggcacccaaaactcatgggggcacaatcctggggcacctgcaggaggagcttcgcatatttaaataaataaacctagcatgctgaatgcacgtgacaccgactgacttcagggatctgggccaggagtgtggtggacattggacaaagaggccattttggctgcgggaggacactctgatctcgaagcctgccataaaggtagcaaatagactcttgggattcccctcttctgtgcacatcgttgaatgaagagagtctttttgcacaaacttcacttgaaattgtgccactgatgataaacggaatgagagccaaaaaagtttagttggagacagttgtaaattcaatttggagtttatttaattgacttttctatcacgttggggcacatgccaactccctggtttcttcctggcatggtgtttgggcagcaggcatcattttccttttctagcttcataggaatattgtgagctcaccatgctgtggaggttgggaaagagcagagtcttggctgccctgctttctccttaggactcttcacttttctcaccacatctcttgcatgacttcatggtactggggacaagtttgtatgccttcaccccagagctggctgggttatggcttttgtagcagagcccatacagcctatggaagaactagaatctcactcacagtaataagaatctaggaggaattccaaaccgaagcaggcagggtctggaacccaaaggacagcattttctacccacttcttaatattgacagcttccccgttctatttaatgtccaaaaatgtttcccaaaatttcaaactctttcactgtaaagatttgttacaaagaatgtggtttggggaattaccttattttatattgttgtaaacaaacttcaaattctacatgtgcgacttttctccttcctgaagggtgtttagtagtcagcgttttcagaattgttttgttactatactttaacattttacatttcctgtttgtattattttgtgagagcaaggtgatcatgctgcttaaggtccaggtacaacctatttgtaccttttgagacaatatttgtgttacttttgcaggttacggttccacatgtaattgctatattttgttttgtttttccttactaggcaaagttaaaatgttccatgctttgaggagtgacccatttcactactttgttttcttatcactaaaggcaaaaatcaaagcacagttgtccattaacacttataagttaattatgggtttatgagtctgtaatgttatatgctgcaaacatttactatgtaaacgtgaagtagccaataatatctcaatagtagtaacagtatctttagcgacctttggaatagttaagcacaggtcattgtggacatgaattcaggcctctgtactaaaatctatttcagggaatgttctgtctagtgatttgctcaccatttgatatataatgaattataggacaagtataagctgatctgctatagctgtccatcagagagaatacacgtggctataacatctataacaaaacgacgattcctctacaagaggctgtttctcactgctaacgttggtgtttctggcgtgggaagaaatgcacaggcgtgcatggcatgcacgttcagacagctgcattgtaagagttctgtcatgcagtctgaaaagggaagaaacaggatggctttctgtagccacacctgtgaggcgtgatgattgttgtattattagattactgatttttcttttctgaaaatacatttgagttttaatcacatctgtggaagctgtaacttttaaggtagtcaatttcatgtcttgttcaacgatgtaagcagaaactgaattgccctaattttgccaactggccattattgggattattgtttaaatttttggtaaaggaagtaatctcctttcattcattgtgacttttgttcttagggaagcagagaagactccccaagttcttataacctcattgtgcttccctaatttaaagccatgttgaggggctccattcccaattcctgggtcaaggtgaattaaccctatgttggagcactggaaaccgttatttgcaaacattgctgttaccatttagaaatatgtgcactatcagctgggtgcagtggctcacgtctgtaatcccagcactttgggaggccgaggcaggtggatcacctgaggtcaggagttcgagaccagcctggccaacagggtgaaaccccgtctctactaaaagtacaaaaattagctgggcgtggtggcggacgcctgtaatctcagctacttgggaggctgaagcaggagaggtgctggaacctgggaggcggaggttgaagtgagccgagattgcgctattgcactccagctcgggcgacaactgcaagactccatctcaaaaaaataaaaataaaagaaaagaaagaaatatgtgcactacctaagttttgtctttagaaaaactatccacctataaaaaattaccttgacaaaaatagttccggtttgactaatcattttgtttctttaagtggtaagtgtatgcaaggtggatccttgatgagccaacattgcactgtggatacatatctatgtttacgcgctattagaacagaaggcgctgtatatagaaatgttgctttgaagcaatatttgcaaaacacgcagacttctgtatctgtatttggaaaaaataaaacaggttcttgttgctatgtttcagtt

SEQ ID NO: 10014 - protein, 1012 aa, Homo sapiens; identical to SEQ ID NO: 1253

SEQ ID NO: 10015 - DNA, 540 bp, Homo sapiens
gtagagacggggtttcaccatgttggctaggattgtctcgatctcttgaccttgtgatcctcccacctcgacctcccaaagtgctgggactacaggcatgagccactgcgcctagcctggaatgggttgtttaatagatagcttattgtccttcacatgtataatcctttacattatacacttgtgaaaaattttcattgtgaaaaactaaaatttaggaaagtatttaagaagaaaggaacaatcaccaataacctataacttatttttttcttcctcccaaagttctgggattataggcatgagccaccatgcctggccttttttttttgtttttgttttttaaagagacaggttcttgctctgtcactcaggctggagtacagtggcacaatcataactcactgcagtctcaacctcctgggctcaagcgatcctcctgcctcagccttttcagtagctgggattataagcctgagccacctcatctggctgtgtatgagttttaatgtgagctccatgtggtacaattttgcatcc

SEQ ID NO: 10016 - protein, 65 aa, Homo sapiens
MPGLFFLFLFFKETGSCSVTQAGVQWHNHNSLQSQPPGLKRSSCLSLFSSWDYKPEPPHLAVYEF

SEQ ID NO: 10017 - DNA, 2068 bp, Homo sapiens
tagtaaacatattccattccctcccaaactttcctcatgcccctttttagttcctccttcccacctctcccctccccctgagctccaggcaaccactattctgcttactgttacttgtggtgtgttttctctcttttttcttcccccccgagatggagtcgctgtgttgcccaggctggagtgaagtggcacgatctcaactcactacaacctctgcctcctgggctcaagcgattctcctgcctcagcctcccaagtagctgggattacaggcatgagccaccacacccagctaatttttgtatttttagtacagatggggttttatcgtattggtcatgctggtcttgaactcctgaccccagctgatctgcctaccttggcctcccaaagtgctgggagtgagccagcatgcccagatggtttgttttcattttgcagactattgtagaaatggaatcctgcagtgcgcacttgttttgtctggctcctttcacccagcatactttgagattcacttatgttgctgttcgtacctttttttctatttttattttttgagacggagtcttgcactgtcgcccaggctggagtgcagtggccagacctcagctcactgcaagctccgcctcctgggttcacgccattctcctgcctcagcctccccagtagctgggactacaggcgcccgctaccacgcccggctaattttttctgtatttttagtagagacagggttttaccatgttagccaggatggtctcaatctcctgacctcgtgatccgcccgccttggcctcccaaagtgctgggattaccggcatgagccactgcgcccggcctgctgttcctacctttattgctgaaaagtcttccattgtgtggatacatcatgaattatttgtacattcacttgatggacatttgggcagttttcagtttggggcgattacaactaaaactgctatgagtcttcatgtataagtctctatgtggacgtaagtgatgctttctcttgaatgaatatgttgtagtggatggcaaggtcataggatatatgtacgtataaactcttgttgatatctaaaaagtaaggcatggtgaattacttgaaatcctataaatatatttggtaagagaagaagaaacgactggatttttttgtttgtttgttttggagacagattcccactctgtcacccaggctggagtgcaatggtgcgatctgggctcactgcaacctccgcctccccgattcgagcaattcttctgcctcagcctcccaagtagctgggattacaggcatctgccaccacgcctgactaatttttatatttttagtagagacggggttttgccatgtgggccaggctgatctcaagctcctgacctcaggtgattcacctgccttggcctcccaaagtgctgggattacaggcatgagccaccgtgcccggctacgactgaatttttctttctttcttttttttttttttctttgagatggagtctcgctctgtcgccaggttgcagtgagctgagatcgcgccactgcactccagcctgggtgacatggcgatgaaaacaacaaaaatcagatccccaggtgattccagtatgtagccagggttgaggagcagtgatctaagtagagttttgcaaacttgtctgtaaagggccagataataaatacttttcaaccttggggttgaaaggtctctgtcctcacttttcagctctgctgttgaagtgtgaaagacacgtaaccaatgaacatggcatgtttcactaaaatccatttacaatgacgggccatgggccagagtgtgctgagctggactgaaaggctaagtgatggaggcgtggctctgcctccagactggagcaatctgctccagacttcccaggcagagccagacccatcggacatgcttgcttaggagaagaataagcaccccagcattgaaaacaaaatgttaaaatgccaacatttgtgtttaattctagctacaaaagacaaggaaaagaataaagagaagaaattcaaggagtttgtgagagtgaagcc

SEQ ID NO: 10018 - protein, 120 aa, Homo sapiens
MVCFHFADYCRNGILQCALVLSGSFHPAYFEIHLCCCSYLFFYFYFLRRSLALSPRLECSGQTSAHCKLRLLGSRHSPASASPVAGTTGARYHARLIFSVFLVETGFYHVSQDGLNLLTS

SEQ ID NO: 10019 - DNA, 543 bp, Homo sapiens
aattgagaacccctgcaatggtgccagttactccaaagcccatgtcctctttgtcctctcaacagaagccgggagcatcctgatctgccgctgtggtgccagccttggaaacagcactcaggggaggggagatctcatttcagaaacatccctgtcactgacaccaggagcaaggaggaagctccaagctatagaactttgaacggggcagtggagaagcccaggcccctggccctgcccctgccgcgttctgtggaggaatcctatatcaccagtgagcattgctaccagaagccccgcgcctattaccctgccgtggagcagaagctggtggtggagacgaggggctctgccctcgacgatgcggtcaaccccctccatgagaacggcgatgattccctttccccgcgcctgggctggcctctagaccaagacaggagcaagggggacagtgaccccaaacccggctccccaaaggtgaaggaatatgtctccaaaaaggccctaccagaagaagcccctgctcggaagctgctggacaga

SEQ ID NO: 10020 - protein, 178 aa, Homo sapiens
EPLQWCQLLQSPCPLCPLNRSREHPDLPLWCQPWKQHSGEGRSHFRNIPVTDTRSKEEAPSYRTLNGAVEKPRPLALPLPRSVEESYITSEHCYQKPRAYYPAVEQKLVVETRGSALDDAVNPLHENGDDSLSPRLGWPLDQDRSKGDSDPKPGSPKVKEYVSKKALPEEAPARKLLD

SEQ ID NO: 10021 - DNA, 902 bp, Homo sapiens
cacgcgcagctcgccctcccgcaccgcgagggcagcagccgcctcatgcgactcgagaacgctagagggcgccgcttccgggagcccgcaagcggcttccgggtgctcgcgcgccgacctggacgcagagaagccagagactttcgcttccggctgccgcaggcgcttcgctggtgcagacgcagtgctgagcacacagctaccggacaaagagtgacgcccggagctggagttatggcggctacggagccgatcttggcggccactgggagtcccgcggcggtgccaccggagaaactggaaggagccggttcgagctcagcccctgagcgtaactgtgtgggctcctcgctgccagaggcctcaccgcctgcccctgagccttccagtcccaacgccgcggtccctgaagccatccctacgccccgagctgcggcctccgcggccctggagctgcctctcgggcccgcacccgtgagcgtagcgcctcaggccgaagctgaagcgcgctccacaccaggccccgccggctctagactcggtcccgagacgttccgccagcgtttccggcagttccgctaccaggatgcggcgggtccccgggaggctttccggcagctgcgggagctgtcccgccagtggctgcggcctgacatccgcaccaaggagcagatcgtggagatgctggtgcaagagcagctgctcgccatcctgcccgaggcggctcgggcccggcggatccgccgccgcacggatgtgcgcatcactggctgagcggtggagctgcgggcggccagggccgggcgctctgtgcggactggggccatgatcgggcccgggggcctgagcctgggaccccaccccgtgttaatgaaaaatgagttttggcagcgcctgtggtc

SEQ ID NO: 10022 - protein, 242 aa, Homo sapiens
MRLENARGRRFREPASGFRVLARRPGRREARDFRFRLPQALRWCRRSAEHTATGQRVTPGAGVMAATEPILAATGSPAAVPPEKLEGAGSSSAPERNCVGSSLPEASPPAPEPSSPNAAVPEAIPTPRAAASAALELPLGPAPVSVAPQAEAEARSTPGPAGSRLGPETFRQRFRQFRYQDAAGPREAFRQLRELSRQWLRPDIRTKEQIVEMLVQEQLLAILPEAARARRIRRRTDVRITG

SEQ ID NO: 10023 - DNA, 1149 bp, Homo sapiens
tttagagttcacttattaaatgctgacgttaacagaacccacagagccgcatttcccttggtttcggaggacacgcgaaaaataacaacagcaaagggttctcgagcatctccttcgcgccagacggtgtgttgtactttgtcatcgtcgcagtaaggccggtgctatcgccctcctagtttgaccaagcgagaggactttctccagatgggcccctcccgagagaatggtcgccgtcccgctctcctgttcgggtcaccaccggccgggcgccactcgaacgagccccggccagccgtcaccctaatcattcccgaaggaggggccatcagagctacagctcatcagggtcaatcagaaggggcgcccgcacgcaaaggtcacctactttcgcttccggctgccgcaggcgcttcgctggtgcagacgcagtgctgagcacacagctaccggacaaagagtgacgcccggagctggagttatggcggctacggagccgatcttggcggccactgggagtcccgcggcggtgccaccggagaaactggaaggagccggttcgagctcagcccctgagcgtaactgtgtgggctcctcgctgccagaggcctcaccgcctgcccctgagccttccagtcccaacgccgcggtccctgaagccatccctacgccccgagctgcggcctccgcggccctggagctgcctctcgggcccgcacccgtgagcgtagcgcctcaggccgaagctgaagcgcgctccacaccaggccccgccggctctagactcggtcccgagacgttccgccagcgtttccggcagttccgctaccaggatgcggcgggtccccgggaggctttccggcagctgcgggagctgtcccgccagtggctgcggcctgacatccgcaccaaggagcagatcgtggagatgctggtgcaagagcagctgctcgccatcctgcccgaggcggctcgggcccggcggatccgccgccgcacggatgtgcgcatcactggctgagcggtggagctgcgggcggccagggccgggcgctctgtgcggactggggccatgatcgggcccgggggcctgagcctgggaccccaccccgtgttaatgaaaaatgagttttggcagcgcctgtggtc

SEQ ID NO: 10024 - protein, 76 aa, Homo sapiens
MGPSRENGRRPALLFGSPPAGRHSNEPRPAVTLIIPEGGAIRATAHQGQSEGAPARKGHLLSLPAAAGASLVQTQC

SEQ ID NO: 10025 - DNA, 1739 bp, Homo sapiens
gtgacttgctcctccttgtcttccaccacgattgtgaggcctccctagccacgtggagctctcaaaggtggagacaacccaaatgtccttcaatggatggttaaatataccatggtacatctataccatagattactactcagcaataaaaaggacaaactattgatacaagcaaccacttgggtgaatctccagggaattgtgccaagtggaaagagccaagcccaaatgattatacactatatgattccagaacccacagagccgcatttcccttggtttcggaggacacgcgaaaaataacaacagcaaagggttctcgagcatctccttcgcgccagacggtgtgttgtactttgtcatcgtcgcagtaaggccggtgctatcgccctcctagtttgaccaagcgagaggactttctccagatgggcccctcccgagagaatggtcgccgtcccgctctcctgttcgggtcaccaccggccgggcgccactcgaacgagccccggccagccgtcaccctaatcattcccgaaggaggggccatcagagctacagctcatcagggtcaatcagaaggggcgcccgcacgcaaaggtcacctgcaaaccgaagcggcgcacggataaggtccgggacttgaagtctatctccaaacattcaggctcctcctccgactcctcctcgaactggcgctcagaggcgccaccattcggaaggagcccaggccacgcgcagctcgccctcccgcaccgcgagggcagcagccgcctcatgcgactcgagaacgctagagggcgccgcttccgggagcccgcaagcggcttccgggtgctcgcgcgccgacctggacgcagagaagccagagactttcgcttccggctgccgcaggcgcttcgctggtgcaggtaagctccgcacactctcggccggtcccgagtccgactccctcaagggtgacgcgagctctgccctttaaccggaaacgtctccctgctcaccccacccccgcgcagacgcagtgctgagcacacagctaccggacaaagagtgacgcccggagctggagttatggcggctacggagccgatcttggcggccactgggagtcccgcggcggtgccaccggagaaactggaaggagccggttcgagctcagcccctgagcgtaactgtgtgggctcctcgctgccagaggcctcaccgcctgcccctgagccttccagtcccaacgccgcggtccctgaagccatccctacgccccgagctgcggcctccgcggccctggagctgcctctcgggcccgcacccgtgagcgtagcgcctcaggccgaagctgaagcgcgctccacaccaggccccgccggctctagactcggtcccgagacgttccgccagcgtttccggcagttccgctaccaggatgcggcgggtccccgggaggctttccggcagctgcgggagctgtcccgccagtggctgcggcctgacatccgcaccaaggagcagatcgtggagatgctggtgcaagagcagctgctcgccatcctgcccgaggcggctcgggcccggcggatccgccgccgcacggatgtgcgcatcactggctgagcggtggagctgcgggcggccagggccgggcgctctgtgcggactggggccatgatcgggcccgggggcctgagcctgggaccccaccccgtgttaatgaaaaatgagttttggcagcgcctgtggtc

SEQ ID NO: 10026 - protein, 68 aa, Homo sapiens
MVKYTMVHLYHRLLLSNKKDKLLIQATTWVNLQGIVPSGKSQAQMIIHYMIPEPTEPHFPWFRRTREK

SEQ ID NO: 10027 - DNA, 387 bp, Homo sapiens
ggctgccgcaggcgcttcgctggtgcagacgcagtgctgagcacacagctaccggacaaagagtgacgcccggagctggagttatggcggctacggagccgatcttggcgctgcgggagctgtcccgccagtggctgcggcctgacatccgcaccaaggagcagatcgtggagatgctggtgcaagagcagctgctcgccatcctgcccgaggcggctcgggcccggcggatccgccgccgcacggatgtgcgcatcactggctgagcggtggagctgcgggcggccagggccgggcgctctgtgcggactggggccatgatcgggcccgggggcctgagcctgggaccccaccccgtgttaatgaaaaatgagttttggcagcgcc

SEQ ID NO: 10028 - protein, 60 aa, Homo sapiens
MAATEPILALRELSRQWLRPDIRTKEQIVEMLVQEQLLAILPEAARARRIRRRTDVRITG

SEQ ID NO: 10029 - DNA, 703 bp, Homo sapiens
agagactttcgcttccggctgccgcaggcgcttcgctggtgcaggtaagctccgcacactctcggccggtcccgagtccgactccctcaagggtgacgcgagctctgccctttaaccggaaacgtctccctgctcaccccacccccgcgcagacgcagtgctgagcacacagctaccggacaaagagtgacgcccggagctggagttatggcggctacggagccgatcttggcggccactgggagtcccgcggcggtgccaccggagaaactggaaggagccggttcgagctcagcccctgagcgtaactgtgtgggctcctcgctgccagaggcctcaccgcctgcccctgagccttccagtcccaacgccgcggtccctgaagccatccctacgccccgagctgcggcctccgcggccctggagctgcctctcgggcccgcacccgtgagcgtagcgcctcaggccgaagctgaagcgcgctccacaccaggccccgccggctctagactcggtcccgagacgttccgccagcgtttccggcagatccgccgccgcacggatgtgcgcatcactggctgagcggtggagctgcgggcggccagggccgggcgctctgtgcggactggggccatgatcgggcccgggggcctgagcctgggaccccaccccgtgttaatgaaaaatgagttttggcagcgcc

SEQ ID NO: 10030 - protein, 124 aa, Homo sapiens
MAATEPILAATGSPAAVPPEKLEGAGSSSAPERNCVGSSLPEASPPAPEPSSPNAAVPEAIPTPRAAASAALELPLGPAPVSVAPQAEAEARSTPGPAGSRLGPETFRQRFRQIRRRTDVRITG

SEQ ID NO: 10031 - DNA, 658 bp, Homo sapiens
agagactttcgcttccggctgccgcaggcgcttcgctggtgcaggtaagctccgcacactctcggccggtcccgagtccgactccctcaagggtgacgcgagctctgccctttaaccggaaacgtctccctgctcaccccacccccgcgcagacgcagtgctgagcacacagctaccggacaaagagtgacgcccggagctggagttatggcggctacggagccgatcttggcggccactgggagtcccgcggcggtgccaccggagaaactggaaggagccggttcgagctcagcccctgagcgtaactgtgtgggctcctcgctgccagaggcctcaccgcctgcccctgagccttccagtcccaacgccgcggtccctgaagccatccctacgccccgagctgcggcctccgcggccctggagctgcctctcgggcccgcacccgtgagcgtagcgcctcaggccgaagctgaagcgcgctccacaccaggccccgccggctctagacgcacggatgtgcgcatcactggctgagcggtggagctgcgggcggccagggccgggcgctctgtgcggactggggccatgatcgggcccgggggcctgagcctgggaccccaccccgtgttaatgaaaaatgagttttggcagcgcc

SEQ ID NO: 10032 - protein, 109 aa, Homo sapiens
MAATEPILAATGSPAAVPPEKLEGAGSSSAPERNCVGSSLPEASPPAPEPSSPNAAVPEAIPTPRAAASAALELPLGPAPVSVAPQAEAEARSTPGPAGSRRTDVRITG

SEQ ID NO: 10033 - DNA, 596 bp, Homo sapiens
agagactttcgcttccggctgccgcaggcgcttcgctggtgcaggtaagctccgcacactctcggccggtcccgagtccgactccctcaagggtgacgcgagctctgccctttaaccggaaacgtctccctgctcaccccacccccgcgcagacgcagtgctgagcacacagctaccggacaaagagtgacgcccggagctggagttatggcggctacggagccgatcttggcggccactgggagtcccgcggcggtgccaccggagaaactggaaggagccggttcgagctcagcccctgagcgtaactgtgtgggctcctcgctgccagaggcctcaccgcctgcccctgagccttccagtcccaacgccgcggtccctgaagccatccctacgccccgagctgcggcctccgcggccctggagctgcctctcgggcccgcacccgtgagcgtagcgcctcaggccgaagctgaagcgcgctccacaccaggccccggccgggcgctctgtgcggactggggccatgatcgggcccgggggcctgagcctgggaccccaccccgtgttaatgaaaaatgagttttggcagcgcc

SEQ ID NO: 10034 - protein, 124 aa, Homo sapiens
MAATEPILAATGSPAAVPPEKLEGAGSSSAPERNCVGSSLPEASPPAPEPSSPNAAVPEAIPTPRAAASAALELPLGPAPVSVAPQAEAEARSTPGPGRALCADWGHDRARGPEPGTPPRVNEK

SEQ ID NO: 10035 - DNA, 883 bp, Homo sapiens
ggacgcagagaagccagagactttcgcttccggctgccgcaggcgcttcgctggtgcaggtaagctccgcacactctcggccggtcccgagtccgactccctcaagggtgacgcgagctctgccctttaaccggaaacgtctccctgctcaccccacccccgcgcagacgcagtgctgagcacacagctaccggacaaagagtgacgcccggagctggagttatggcggctacggagccgatcttggcggccactgggagtcccgcggcggtgccaccggagaaactggaaggagccggttcgagctcagcccctgagcgtaactgtgtgggctcctcgctgccagaggcctcaccgcctgcccctgagccttccagtcccaacgccgcggtccctgaagccatccctacgccccgagctgcggcctccgcggccctggagctgcctctcgggcccgcacccgtgagcgtagcgcctcaggccgaagctgaagcgcgctccacaccaggccccgccggctctagactcggtcccgagacgttccgccagcgtttccggcagttccgctaccaggatgcggcgggtccccgggaggctttccggcagctgcgggagctgtcccgccagtggctgcggcctgacatccgcaccaaggagcagatcgtggagatgctggtgcaagagcagctgctcgccatcctgcccgaggcggctcgggcccggcggatccgccgccgcacggatgtgcgcatcactggctgagcggtggagctgcgggcggccagggccgggcgctctgtgcggactggggccatgatcgggcccgggggcctgagcctgggaccccaccccgtgttaatgaaaaatgagttttggcagcgcc

SEQ ID NO: 10036 - protein, 179 aa, Homo sapiens; identical to SEQ ID NO: 1255

SEQ ID NO: 10037 - DNA, 1927 bp, Homo sapiens
agctgatggtatggtaggaggagtggagtggagctcttgccttgttactgaggaaatctatttgtttctagtattactggatttttggggaaaaatttgtagtcctccccttgaaaggcaaaggggctagttgtgccatttgcctgcacaggaaccatgaggagacatatggtaacttatgcctggcagctcctgaagaaggaactgggactgtaccagctcgccatggatatcatcataatgatccgagtgtgtaaaatgttccgccaaggcctcaggggattccgggaatatcaaatcattgagactgctcactggaagcaccctatcttctccttctgggataaaaagatgcaaagccgagtcacatttgataccatggacttcattgcagaggagggtcactttcctccaaaggccattcagatcatgcagaagaagccttcctggagaacagaggatgagatccaggccgtctgtaacatcttgcaggttctggatagctatcggaactacgcagagcccctgcagctgctcctggccaaagtcatgcgctttgaacggtttggtcgcaggcgtgtgatcatcaagaaggggcagaagggcaacagcttttatttcatctacctgggcacagttgcaataaccaaggacgaggatggcagcagtgccttcctagatccccacccgaaattgctgcacaagggtagctgttttggggaaatggacgttctgcatgcttcagtgaggaggtccaccatcgtctgtatggaagaaacggagttcctggttgttgaccgggaggacttctttgctaataagctggaccaggaagttcagaaggatgctcagtatcggtttgaattttttaggaagatggagctgtttgcatcatggtctgatgagaagctctggcagctggtagccatggcgaagatagagaggttctcgtatgggcagctgatctcaaaagattttggagagtcacccttcatcatgtttatcagcaagggcagctgtgaagtcctgcggctgttggaccttggggcctccccttcctaccgtagatggatctggcagcacctggagctgatagatggcagacctctgaagacccacctgagtgaatactctcctatggaaagatttaaggaattccagatcaaatcatatcctctgcaagactttagctccttgaaacttccacatctcaaaaaagcctgggggctacaggggacaagcttcagcaggaagatcagaacctcaggagacactctccccaagatgctgggcccgaagatccaatccaggcctgctcagtcgatcaaatgtgccatgatcaatatcaagcctggtgagctccccaaggaggctgcagtgggggcctacgtgaaggtgcacactgtggagcagggagaaattttggccttccttccagagggtgaatgcgacacacgacccttgatcctgatgagcctgggaaatgagttgatacggataaggaaggaaatattttatgaactgattgacaatgatgacgagatgataaaaaagttgttaaagctcaatattgcattccccagtgatgaagatatgtgccagaagttcctccagcagaacagctggaatatctttcggaaggacctgttgcagctgctcgtggagccttgccaaagtcaactgttcactccaaaccggcccaagaagagagagatctacaaccctaagtctgtggtcctggatttgtgcagcatcaacaagacgactaaacctcgttatcctatttttatggcaccccagaaatacctccccccattgaggattgtccaagccatcaaagcacctcggtacaaaatccgagaactcttggcttagtgtaagagcacaggggtccttatttaggacaaataaaggatggtggattggg

SEQ ID NO: 10038 - protein, 572 aa, Homo sapiens
MRRHMVTYAWQLLKKELGLYQLAMDIIIMIRVCKMFRQGLRGFREYQIIETAHWKHPIFSFWDKKMQSRVTFDTMDFIAEEGHFPPKAIQIMQKKPSWRTEDEIQAVCNILQVLDSYRNYAEPLQLLLAKVMRFERFGRRRVIIKKGQKGNSFYFIYLGTVAITKDEDGSSAFLDPHPKLLHKGSCFGEMDVLHASVRRSTIVCMEETEFLVVDREDFFANKLDQEVQKDAQYRFEFFRKMELFASWSDEKLWQLVAMAKIERFSYGQLISKDFGESPFIMFISKGSCEVLRLLDLGASPSYRRWIWQHLELIDGRPLKTHLSEYSPMERFKEFQIKSYPLQDFSSLKLPHLKKAWGLQGTSFSRKIRTSGDTLPKMLGPKIQSRPAQSIKCAMINIKPGELPKEAAVGAYVKVHTVEQGEILAFLPEGECDTRPLILMSLGNELIRIRKEIFYELIDNDDEMIKKLLKLNIAFPSDEDMCQKFLQQNSWNIFRKDLLQLLVEPCQSQLFTPNRPKKREIYNPKSVVLDLCSINKTTKPRYPIFMAPQKYLPPLRIVQAIKAPRYKIRELLA

SEQ ID NO: 10039 - DNA, 2531 bp, Homo sapiens
gatggtatggtaggaggagtggagtggagctcttgccttgttactgaggaaatctatttgtttctagtattactggatttttggggaaaaatttgtagtcctccccttgaaaggcaaaggggctagttgtgccatttgcctgcacaggaaccatgaggagacatatggtaacttatgcctggcagctcctgaagaaggaactgggactgtaccagctcgccatggatatcatcataatgatccgagtgtgtaaaatgttccgccaaggcctcaggggattccgggaatatcaaatcattgagactgctcactggaagcaccctatcttctccttctgggatgtaagcagttgggctcagcaggattatgagggctcaaagaagcccaataaattgcatcccacttcctggcctaagctcagaactgagaaagaagacaaaaggaaaagcagatgagagacccaatggtcacttttattaatggccatacttctgttggagagggtgacttacatcatcaaccaagaggtttacctaatactgaaccccagatttagacagccttacatgcctagccacaggcaacgctggaccaaggcaggctccactgcaacagcaggcctgctgccaaaactcatggcagggaaaggtggagcaaaatatgggctgagagggaaggagacaatcatgcctagtttttctctttccaaattcatcaaagagtttaagtcactcctcaatgtaaaaggagagaggccagtagtgttctactaatacacctccctccatgtggaaagaaaccttgggagtagagaggtggtctccatttcaatggtgatcaaaagagccagaagcaatccaggaatcacaataaccagggttttctaaatgcccacacgctctctctattcgcgtctctactttctttcctacacccctacttcggtgcaggggcattttcagggctttgttcactgcggtgaccatgtttcttttatttttttgagacggagtcttgctctgttgcccaggctggagtgcagtggcgcgtcttggctcactgcaagctccacctcccgggttcacaccattctcctgcctcagcctccctagtagctgggactacaggcacccgccaccacacccagctaattttttgtatttttagtagagacggggtttcaccttgttagccaggatggtcttgatctcttgacctcgtgatccacctgcctcggcctcccaaagtgctgggattacaggcgtgagccaccgtgcctggcctggtgaccaggtttctagatttcctagaaggtcccaatttaaaatattttatcccagtggtagatcatgtgcccttctttagctcagaaaagttggtcacccttctgctaacttgttctagttccccagaggtatcttcattgctactgggtgtgttgctcagggcttcaaagtttccccagcaatcacctggacaaatcctgcccatttttctgttgtttcaggaatgactagagccagtccccactcctctgcatctagtgattcactccaagaaatttccctaaagggcttctgacagatagtggccaaagaaagggggatacggggctggtgatgggggaaggaaaggcagccttaaactggtttctgaggggccagcaggtaatataactagtgtgtatgtagctgagtttaagatacagcaggccagctggagaggaaagatacacctcatctaaagacattcagatacaaatattatattttaagaccctgtgctggccaaaccaaacaaggctgcagccctgtggttgggctgagatgaaaaacgaatggagtagaagaactgtaaccaaaagactcaggttagctctcaggaaggacctcctgactctcagggtggcatgtaatggtgatgcaatgggccctggagatcagagggctttggttaccagaagacgtggcctgatgcatggggcagttggaagctaagatgcagagtcacttgttgtcaggggaatgtgaggctaagcctaaccacattggccagccagagtggcttgagcagagcagaagcctctcaagggcagcctataagggtcatagggttgtcaggcggagcactgggcggctggagtgcaggatcaggtggggagccctagactgcttcagtagatgtgtgaatctggatgtttctgagcactgcctctttccttcagtagtctccctgagaagcaccacatggctatgcaaaggataaacacgttgtgggggcgagacgggtctgagtctaaggaacaaatgacatgtggcttgaggccacactccagacacggaattgggtttgctgaaagccttgagttggggtctcagctagaccactgacttgctgtgtgatccttgggcaagttccttcaccatctcagtcctacatggagcttaataaaacctgctttgtcctgatgactaaatggagtaaggcagggaggatacactgtgcttggctcattaaagacatttaacaaa

SEQ ID NO: 10040 - protein, 100 aa, Homo sapiens
MRRHMVTYAWQLLKKELGLYQLAMDIIIMIRVCKMFRQGLRGFREYQIIETAHWKHPIFSFWDVSSWAQQDYEGSKKPNKLHPTSWPKLRTEKEDKRKSR

SEQ ID NO: 10041 - DNA, 465 bp, Homo sapiens
atccaggcctgctcagtcgatcaaatgtgccatgatcaatatcaagcctggtgagctccccaaggaggctgcagtgggggcctacgtgaaggtgcacactgtggagcagggagaaattttgtgatgaagatatgtgccagaagttcctccagcagaacagctggaatatctttcggaaggacctgttgcagctgctcgtggagccttgccaaagtcaactgttcactccaaaccggcccaagaagagagagatctacaaccctaagtctgtggtcctggatttgtgcagcatcaacaagacgactaaacctcgttatcctatttttatggcaccccagaaatacctccccccattgaggattgtccaagccatcaaagcacctcggtacaaaatccgagaactcttggcttagtgtaagagcacaggggtccttatttaggacaaataaaggatggtggattggg

SEQ ID NO: 10042 - protein, 30 aa, Homo sapiens
MINIKPGELPKEAAVGAYVKVHTVEQGEIL

SEQ ID NO: 10043 - DNA, 601 bp, Homo sapiens
aaaaaaaataaaagaaaaaaaagaatgaaaatctgcgggcagacctggccagtctctgaggtctaactttctgtgacttctcccgagggtcttcaccaggccttccttccagagggtgaatgcgacacacgacccttgatcctgatgagcctgggaaatgagttgatacggataaggaaggaaatattttatgaactgattgacaatgatgacgagatgataaaaaagttgttaaagctcaatattgcattccccagtgatgaagatatgtgccagaagttcctccagcagaacagctggaatatctttcggaaggacctgttgcagctgctcgtggagccttgccaaagtcaactgttcactccaaaccggcccaagaagagagagatctacaaccctaagtctgtggtcctggatttgtgcagcatcaacaagacgactaaacctcgttatcctatttttatggcaccccagaaatacctccccccattgaggattgtccaagccatcaaagcacctcggtacaaaatccgagaactcttggcttagtgtaagagcacaggggtccttatttaggacaaataaaggatggtggattggg

SEQ ID NO: 10044 - protein, 134 aa, Homo sapiens
MSLGNELIRIRKEIFYELIDNDDEMIKKLLKLNIAFPSDEDMCQKFLQQNSWNIFRKDLLQLLVEPCQSQLFTPNRPKKREIYNPKSVVLDLCSINKTTKPRYPIFMAPQKYLPPLRIVQAIKAPRYKIRELLA

SEQ ID NO: 10045 - DNA, 5083 bp, Homo sapiens
ctctcttgccagcgcagagaactgccaagtcagttccggtccggcagagatcgcggagagacgcagaacgcagcccgctcctccagggccctccaggccctccggccccgggccggcgggtgaactggggggccccgggacaggccgagccctctgccctgcagataacggaggcctctgctgtggctgcccactggctgtgcccgcccactggctgtgcccagaccttgaagccgcagcgaacctctctttcccaccccacctcggtgactaatggcggccgtggcgtctcccagcccggaccccgccggcacccgggtctcccgacccaagcctcgacgaaacccccgcagagccgccgggacgcagcgcctttgggcggcgctgggcgtggtgggccgggaagtatggcggcagctcgaacgccgcgcggcggaggccattaaggcgtggacggcccgggaaggcggcctagggacgcaagcaggctcggccgcctctttaggccacggagccgcgcagatccggttcccgggtgaccactctgtcgccattgggcgagacctacctagtcctgacgacaacggacaaaggccttaaggggcctggaaggtgagcgaagtcccgaacgacgacgggtggaacggttagcggccatcgggcggttggtcttcattctaccagactttgctgtcggaagagagaaatggtagaatgacaggccacgtttggcccgttggaaatgcccaccaccctctgggaagatttactggccgtttatggaaggcctgtgtatataatatgaaaaagctgctctcaactccaccccaaccttttaatagaaaacatttgtcacatctagcccttctagatggaaagaggttgccgacgtatgataaaatagagttagaaagttacacatcttgtaaattctcatttgtttaaaagaaatcatagaaaatacatgtcttctggagatgacttttggaaatggagttgttaagacggcctctggaagcgatacgtccacgtttgttaagtgggttagatgacatggagctggaagacctgagaaggaagagaagaaggttctatgctagactggtcatatttagaagacattttcatattctatccattgttttgtgtgcattttattcctcactactgtgtatatagttgacaatgctaagcttttttgaaatgtctcttctttttagatgttctgaagtgcctgatatgttaaaattagaggtagcaaaatcacattttgtaaatacctttttgttacaattcataggaaatatttttgggggggaatggccaaatcacctgttgagtaatactcattgtgtttgtgcagtggttcaggggaggagagaggagggggaggtgcagagagctctatgccatcctgtttacagcgaggcaagatgaatcattatgtctgtgcattttgttttacttatctgtgtatatagtgtacataaaggacagacgagtcctaattgacaacatctagtctttctggatgttaaagaggttgccagtgtatgacaaaagtagagttagtaaactaatatattttgtacattttgttttacaagtcctaggaaagattgtcttctgaaaatttgatgtcttctgggttgatggagatgggaagggttctaggccagaatgttcacatttggaagactctttcaaattataactgttgttacatgtttgcagtttattcaagactgctgtatacatagtagacaaattaactccttacttgaaacatctagtctatctagatgtttagaagtgcccgatgtatgttaaatgtataggtagtaaaataccactttgtaaatatctttttgctaaaattcataggaaatgcttttggaaattgaattgtgaagccacctttgtgaacagtatagtaatgtctatacttgttcaatagtttagaggaggtaggagggaagaaattgcaaaaggtaatattactagtgtgttcatacttggacattttcagacaccatttttctatatgttttgtgcattttgttttgctctgtatatagtatatataatggacaaatagtcctaatttttcaacatctagtctctagatgttaaagaggttgccagtgtatgacaaaggagtaaaattagcatattttgtacactttgtgttgaaattcgtaggaaaacttgtcttctgtaaagacttttgcataggaatttgtttgaccatctctaagcattacacgtgcctgtacttgtccactggattgaaggcagagaaggaagggaggagggaatgattcaaggccaaaatggccacatttagaagatacctcagatgataaccattgttatgtgtgtgcaattttatttaacagtgctgtgtatgtggtggacaagttatatgaaatatctagtctttctagatatttggaagtgcttgatgtatttaaaagtggtagtagaataacactttgtaaatagcttttaaaaactgatgggaaatgctgtttggaagtggaattgttgaaccacctgggaggtgggagggaagaaattgcaaatggtgttttgccattgtttattagaaaatttcagcttaatccattgtgtatatgttacatgcatttcatttaactttgctatactgtatatattgtatatataacggacaaattagtcccgattttataatatctagtctctagatattaaagaggttgccaatgtatgacagaagtagagttagtaaactaacacattttgtacactttgttaaaatttgtagaaaggctgtcttctgaaaaggacttttggaagtgagataacatcagctctaagtgacacgtgcctatatccatcaggttggtggtggagaggagttggaaggaatgaagggttctagaccagaatgttcgtatttagaagacactatcagatataaccattgttacatgtgtgtagtttattcaaccctactgtgtatatagcggacaaacttaagtccttatttgaaacatctagtctttctagatgtttagaagtgcacaaagtatgttaaaagtagaggtagtaaataacacattttgtagctatccttttgatatgaaatattgtcttggaaattgatcaattctctgagcagtacccattttgatatttgtgctggttcagggggaaggaggagcacaaagtgcaaagggctttctaccagtgtccagtgtgtttatgaggaggcacattgaccattgtcccttatgtctgcattttcatttactgtgctgtgtatatagtgtatataagcggacataggagtcctaatttacgtctagtcgatgttaaaaaggttgccagtatatgacaaaagtagaattagtaaactactacattgagtacactttgtgttaaaattcatagggaagacttcttaaaaacaagtgaaattgttaaaaccccccctaagcattacagatggcttatagctgtccacggggttggtagaggtgggaaagggaagggttctaggccagaatgttcctatttagaagacactcaaattacagtctgtgttatgtatgtataccatttattcaatgctactgtgtatataatggaaaacttaagtccagtttgaaacatctagtctttctaggtgtttaaaagtgtacaacgtgcacaatgtaggttaacagtagagggcttaagtaacacccctctaagcatttgttttcagtacttcctaggagtggttgcatttgggaatggaattgttaaaacttgatgcttaggagcgaatgcagactattcattgggtgtttggggtgggggaagggggggtgggcagaggaggtatgcagggagaggggttctgtgctcctgagattagttcagatggtctaaccattgttctatatgtgcattttagttaatattgtgtattaaaggataagtcttaatgctcaaagtatgttaaaaatagatgtagtaaatcagtccctttgtgaatgtccttttgttagtttttaggaaggcctgtcctctgggagtgacctttattagtccaccccttggagctagacatcctgtacttagtcacggggatggtggaagagggagaagaggaagggtgaagggaagggctctttgctagtatctccatatctagacgatggttttagatgataaccacaggtctacaagagcgtttttagtaaagtgcctgtgttcattgtggacaaagttattattttgcaacatctaagctttacgaatggggtgacaacttatgataaaaactagagctagtgaattagcctatttgtaaatacctttgttataattgataggatacatcttggacatggaattgttaagccacctctgagcagtgtatgtcaggacttgttcattaggttggcagcagaggggcagaaggaattatacaggtagagatgtatgcagatgtgtccatatatgtccatatttacattttgatagccattgatgtatgcatctcttggctgtactataagaacacattaattcaatggaaatacactttgctaatattttaatggtatagatctgctaatgaattctcttaaaaacatactgtattctgttgctgtgtgtttcattttaaattgagcattaagggaatgcagcatttaaatcagaactctgccaatgcttttatctagaggcgtgttgccatttttgtcttatatgaaatttctgtcccaagaaaggcaggattacatctttttttttttttttagcagtttgagttggtgtagtgtattcttggttatcagaatactcatatagctttgggattttgaattggtaaatattcatgatgtgtgaaaaatcatgatacatactgtacagtctcagtcccataaaattggatgttgtgcctacacacaggatctagaagaatatgtcaaactataaactgcttgtgattgtgaatgactttgttctttgcttgtgtttttcaatttcctataatgcacatactaacttttaaaaaataaaggttattttaaaagcctgtatt

SEQ ID NO: 10046 - protein, 108 aa, Homo sapiens [sequence omitted]

SEQ ID NO: 10047 - DNA, 5339 bp, Homo sapiens
agttccggtccggcagagatcgcggagagacgcagaacgcagcccgctcctccagggccctccaggccctccggccccgggccggcgggtgaactggggggccccgggacaggccgagccctctgccctgcagataacggaggcctctgctgtggctgcccactggctgtgcccgcccactggctgtgcccagaccttgaagccgcagcgaacctctctttcccaccccacctcggtgactaatggcggccgtggcgtctcccagcccggaccccgccggcacccgggtctcccgacccaagcctcgacgaaacccccgcagagccgccgggacgcagcgcctttgggcggcgctgggcgtggtgggccgggaagtatggcggcagctcgaacgccgcgcggcggaggccattaaggcgtggacggcccgggaaggcggcctagggacgcaagcaggctcggccgcctctttaggccacggagccgcgcagatccggttcccgggtgaccactctgtcgccattgggcgagacctacctagtcctgacgacaacggacaaaggccttaaggggcctggaaggtgagcgaagtcccgaacgacgacgggtggaacggttagcggccatcgggcggttggtcttcattctaccagactttgctgtcggaagagagaaatggtagaatgacaggccacgtttggcccgttggaaatgcccaccaccctctgggaagatttactggccgtttatggaaggcctgtgtatataatatgaaaaagctgctctcaactccaccccaaccttttaatagaaaacatttgtcacatctagcccttctagatggaaagaggttgccgacgtatgataaaatagagttagaaagttacacatcttgtaaattctcatttgtttaaaagaaatcatagaaaatacatgtcttctggagatgacttttggaaatggagttgttaagacggcctctggaagcgatacgtccacgtttgttaagtgggttagatgacatggagctggaagacctgagaaggaagagaagaaggttctatgctagactggtcatatttagaagacattttcatattctatccattgttttgtgtgcattttattcctcactactgtgtatatagttgacaatgctaagcttttttgaaatgtctcttctttttagatgttctgaagtgcctgatatgttaaaattagaggtagcaaaatcacattttgtaaatacctttttgttacaattcataggaaatatttttgggggggaatggccaaatcacctgttgagtaatactcattgtgtttgtgcagtggttcaggggaggagagaggagggggaggtgcagagagctctatgccatcctgtttacagcgaggcaagatgaatcattatgtctgtgcattttgttttacttatctgtgtatatagtgtacataaaggacagacgagtcctaattgacaacatctagtctttctggatgttaaagaggttgccagtgtatgacaaaagtagagttagtaaactaatatattttgtacattttgttttacaagtcctaggaaagattgtcttctgaaaatttgatgtcttctgggttgatggagatgggaagggttctaggccagaatgttcacatttggaagactctttcaaattataactgttgttacatgtttgcagtttattcaagactgctgtatacatagtagacaaattaactccttacttgaaacatctagtctatctagatgtttagaagtgcccgatgtatgttaaatgtataggtagtaaaataccactttgtaaatatctttttgctaaaattcataggaaatgcttttggaaattgaattgtgaagccacctttgtgaacagtatagtaatgtctatacttgttcaatagtttagaggaggtaggagggaagaaattgcaaaaggtaatattactagtgtgttcatacttggacattttcagacaccatttttctatatgttttgtgcattttgttttgctctgtatatagtatatataatggacaaatagtcctaatttttcaacatctagtctctagatgttaaagaggttgccagtgtatgacaaaggagtaaaattagcatattttgtacactttgtgttgaaattcgtaggaaaacttgtcttctgtaaagacttttgcataggaatttgtttgaccatctctaagcattacacgtgcctgtacttgtccactggattgaaggcagagaaggaagggaggagggaatgattcaaggccaaaatggccacatttagaagatacctcagatgataaccattgttatgtgtgtgcaattttatttaacagtgctgtgtatgtggtggacaagttatatgaaatatctagtctttctagatatttggaagtgcttgatgtatttaaaagtggtagtagaataacactttgtaaatagcttttaaaaactgatgggaaatgctgtttggaagtggaattgttgaaccacctgggaggtgggagggaagaaattgcaaatggtgttttgccattgtttattagaaaatttcagcttaatccattgtgtatatgttacatgcatttcatttaactttgctatactgtatatattgtatatataacggacaaattagtcccgattttataatatctagtctctagatattaaagaggttgccaatgtatgacagaagtagagttagtaaactaacacattttgtacactttgttaaaatttgtagaaaggctgtcttctgaaaaggacttttggaagtgagataacatcagctctaagtgacacgtgcctatatccatcaggttggtggtggagaggagttggaaggaatgaagggttctagaccagaatgttcgtatttagaagacactatcagatataaccattgttacatgtgtgtagtttattcaaccctactgtgtatatagcggacaaacttaagtccttatttgaaacatctagtctttctagatgtttagaagtgcacaaagtatgttaaaagtagaggtagtaaataacacattttgtagctatccttttgatatgaaatattgtcttggaaattgatcaattctctgagcagtacccattttgatatttgtgctggttcagggggaaggaggagcacaaagtgcaaagggctttctaccagtgtccagtgtgtttatgaggaggcacattgaccattgtcccttatgtctgcattttcatttactgtgctgtgtatatagtgtatataagcggacataggagtcctaatttacgtctagtcgatgttaaaaaggttgccagtatatgacaaaagtagaattagtaaactactacattgagtacactttgtgttaaaattcatagggaagacttcttaaaaacaagtgaaattgttaaaaccccccctaagcattacagatggcttatagctgtccacggggttggtagaggtgggaaagggaagggttctaggccagaatgttcctatttagaagacactcaaattacagtctgtgttatgtatgtataccatttattcaatgctactgtgtatataatggaaaacttaagtccagtttgaaacatctagtctttctaggtgtttaaaagtgtacaacggcctgtcgcagtggcgcatgcctgtaatcccagcactttgggaggccgaggcaggcggatcacgaggtcaagagatcaggaccatcttggccaacatggtgaaaccccatctttactaaaaatacaaaaattagctggtcgtggtggtgcccacctgtagccccagttactcgagaggctgaggcaggagaatcgcttgaacttgggaggcggaagttgcagtgagccaagatcgcaccactgcactccagcctggcgacagagcgaggctccgtttcaaaaaaaaaagtgcacaatgtaggttaacagtagagggcttaagtaacacccctctaagcatttgttttcagtacttcctaggagtggttgcatttgggaatggaattgttaaaacttgatgcttaggagcgaatgcagactattcattgggtgtttggggtgggggaagggggggtgggcagaggaggtatgcagggagaggggttctgtgctcctgagattagttcagatggtctaaccattgttctatatgtgcattttagttaatattgtgtattaaaggataagtcttaatgctcaaagtatgttaaaaatagatgtagtaaatcagtccctttgtgaatgtccttttgttagtttttaggaaggcctgtcctctgggagtgacctttattagtccaccccttggagctagacatcctgtacttagtcacggggatggtggaagagggagaagaggaagggtgaagggaagggctctttgctagtatctccatatctagacgatggttttagatgataaccacaggtctacaagagcgtttttagtaaagtgcctgtgttcattgtggacaaagttattattttgcaacatctaagctttacgaatggggtgacaacttatgataaaaactagagctagtgaattagcctatttgtaaatacctttgttataattgataggatacatcttggacatggaattgttaagccacctctgagcagtgtatgtcaggacttgttcattaggttggcagcagaggggcagaaggaattatacaggtagagatgtatgcagatgtgtccatatatgtccatatttacattttgatagccattgatgtatgcatctcttggctgtactataagaacacattaattcaatggaaatacactttgctaatattttaatggtatagatctgctaatgaattctcttaaaaacatactgtattctgttgctgtgtgtttcattttaaattgagcattaagggaatgcagcatttaaatcagaactctgccaatgcttttatctagaggcgtgttgccatttttgtcttatatgaaatttctgtcccaagaaaggcaggattacatctttttttttttttttagcagtttgagttggtgtagtgtattcttggttatcagaatactcatatagctttgggattttgaattggtaaatattcatgatgtgtgaaaaatcatgatacatactgtacagtctcagtcccataaaattggatgttgtgcctacacacaggatctagaagaatatgtcaaactataaactgcttgtgattgtgaatgactttgttctttgcttgtgtttttcaatttcctataatgcacatactaacttttaaaaaataaaggttattttaaaagcctgta

SEQ ID NO: 10048 - protein, 108 aa, Homo sapiens [sequence omitted]

SEQ ID NO: 10049 - DNA, 1233 bp, Homo sapiens
gtggttgcatttgggaatggaattgttaaaacttgatgcttaggagcgaatgcagactattcattgggtgtttggggtgggggaagggggggtgggcagaggaggtatgcagggagaggggttctgtgctcctgagattagttcagatggtctaaccattgttctatatgtgcattttagttaatattgtgtattaaaggataagtcttaatgctcaaagtatgttaaaaatagatgtagtaaatcagtccctttgtgaatgtccttttgttagtttttaggaaggcctgtcctctgggagtgacctttattagtccaccccttggagctagacatcctgtacttagtcacggggatggtggaagagggagaagaggaagggtgaagggaagggctctttgctagtatctccatatctagacgatggttttagatgataaccacaggtctacaagagcgtttttagtaaagtgcctgtgttcattgtggacaaagttattattttgcaacatctaagctttacgaatggggtgacaacttatgataaaaactagagctagtgaattagcctatttgtaaatacctttgttataattgataggatacatcttggacatggaattgttaagccacctctgagcagtgtatgtcaggacttgttcattaggttggcagcagaggggcagaaggaattatacaggtagagatgtatgcagatgtgtccatatatgtccatatttacattttgatagccattgatgtatgcatctcttggctgtactataagaacacattaattcaatggaaatacactttgctaatattttaatggtatagatctgctaatgaattctcttaaaaacatactgtattctgttgctgtgtgtttcattttaaattgagcattaagggaatgcagcatttaaatcagaactctgccaatgcttttatctagaggcgtgttgccatttttgtcttatatgaaatttctgtcccaagaaaggcaggattacatctttttttttttttttagcagtttgagttggtgtagtgtattcttggttatcagaataccataaaattggatgttgtgcctacacacaggatctagaagaatatgtcaaactataaactgcttgtgattgtgaatgactttgttctttgcttgtgtttttcaatttcctataatgcacatactaacttttaaaaaataaaggttattttaaaagcctg

SEQ ID NO: 10050 - protein, 45 aa, Homo sapiens
MLLSRGVLPFLSYMKFLSQERQDYIFFFFFSSLSWCSVFLVIRIP

SEQ ID NO: 10051 - DNA, 468 bp, Homo sapiens
ctcctgctcaaaagcaggatgccagctgggcgcaggggctcacacccggccaaaatgcttaattttaacaagcacttactttctgtcttatatgcagatgttgtgttatactctagggatacaagttggataagacatagtcccttgttgaatggatggatgaataaaaatgctcctctgggcctcacccagaaatctgcctgatacccactctaaacaaaataaaacaacttatcacaggggatttgaacaaaggaaaataaaaaatataaagttcaaaatcattaacctggcatccaagaccttctacaatctgattctaattttgtctacctaccacactcttagctctagccaaactaaagtgttttgttgtcctagaaaacactatgtctccacttgcatgttcgtttgcccaggctctggttttctcccatggtttcttttcctgtttttctctcccatttg

SEQ ID NO: 10052 - protein, 61 aa, Homo sapiens
MPAGRRGSHPAKMLNFNKHLLSVLYADVVLYSRDTSWIRHSPLLNGWMNKNAPLGLTQKSA

SEQ ID NO: 10053 - DNA, 359 bp, Homo sapiens
agagtgggtatcaggcagatttctgggtgaggcccagaggagcatttttattcatccatccattcaacaagggactatgtcttatccaacttgtatccctagagtataacacaacatctgcatataagacagaaagtcagtggattcaaaacgatgaaagtggattcaaaacctctgtcaaggggtgctgtcctttcctggccaagtctcttttattctcttagggctgcaacctcttcacctgggaaatgaatggtcctgtgatttacaagagcagggtccaggctgaaggtgcaggccctatccaagacacaacatttccagtggcagagataaaaaagtaagatttcagactcaaa

SEQ ID NO: 10054 - protein, 31 aa, Homo sapiens
MNGPVIYKSRVQAEGAGPIQDTTFPVAEIKK

SEQ ID NO: 10055 - DNA, 616 bp, Homo sapiens
aaagtggcaacaacactgatcttgccctcctccctaagttgctacaaaaagacatagtaaaaatctttagggtgccgggcagggtggctcacggctgtaatctcagcactttgggaggctgaggcaggcagatcaccatgtttgccaggctggtcttgaactcctgaccttgtgatccaccctcctcggcctcccaaagtgctgggattacaggcatgaatcaccgtgcccagccccagtctattcttttatctcctggaccactgcagtggtttcctactggtcctgcctgcctctgatccctccccacccatttcttctacacatacagtcacataattgtctggaagcacagctttgatcttgtctttcccttcctaatagaacttgcccattttttcaacttgagaggtcaccaggatcctagttcaatttcccaatgaagacttaatctttccttgaatacatatattgacaaggagttcatcactcccaaggtggtccattccattcttgggtagctccaactgttagggagttctttatagtgagctgaaattgtcttcctggatatccccccactggaggtgatgtgatggaattctctttttttttt

SEQ ID NO: 10056 - protein, 32 aa, Homo sapiens
KSLGCRAGWLTAVISALWEAEAGRSPCLPGWS

SEQ ID NO: 10057 - DNA, 3528 bp, Homo sapiens
cagaattgttgggcttcatcttggctctgtgctgcctggaggggagacctaggataggctcctgatctgcaaaatggggataatcccagctgccacttaagtgagacaagtgcctgactgacagaagttcttgcccccggggagctggtgtggacagaggagggagcctagacatggaggagaaggactacagtgaggccgatggcctttcggagaggaccacgcccagcaaggcccagaaatcgccccagaagattgccaagaaatacaagagtgccatctgccgggtcactctgcttgatgcctcggagtatgagtgtgaggtggagaaacatggccggggccaggtgctgtttgacctggtctgtgaacacctcaacctcctagagaaggactacttcggcctgaccttctgtgatgctgacagccagaagaactggctggacccctccaaggagatcaagaagcagatccggagtagcccctggaattttgccttcacagtcaagttctacccgcctgatcctgcccagctgacagaagacatcacaagatactacctgtgcctgcagctgcgggcagacatcatcacgggccggctgccatgctcctttgtcacgcatgccctactgggctcctacgctgtgcaggctgagctgggtgactatgatgctgaggagcatgtgggcaactatgtcagcgagctccgcttcgcccctaaccagacccgggagctggaggagaggatcatggagctgcataagacatatagggggatgaccccgggagaagcagaaatccacttcttagagaatgccaagaagctttccatgtacggagtagacctgcaccatgccaaggactctgagggcatcgacatcatgttaggcgtttgtgccaatggcctgctcatctaccgggaccggctgagaatcaaccgctttgcctggcccaagatcctcaagatctcctacaagaggagtaacttctatatcaagatccggcctggggagtatgagcaatttgagagcacaattggctttaagctcccaaaccaccggtcagccaagagactgtggaaggtctgcatcgagcatcatacattcttccggctggtgtcccctgagcccccacccaagggcttcctggtgatgggctccaagttccggtacagtgggaggacccaggcacagactcgccaggccagcgccctcattgaccggcctgcacccttctttgagcgttcttccagcaaacggtacaccatgtcccgcagccttgatggagcagagttctcccgcccagcctcggtcagcgagaaccatgatgcagggcctgacggtgacaagcgggatgaggatggcgagtctggggggcaacggtcagaggctgaggagggagaggtcaggactccaaccaagatcaaggagctaaagttcttagacaagccagaagatgtcttgctgaagcaccaggccagcatcaatgagctcaaaaggaccctgaaggagcccaacagcaaactcatccaccgggatcgagactgggaacgggagcgcaggctgccctcctcccccgcctccccctcccccaagggcacccctgagaaagccaatgagagagcagggctgagggagggctccgaggagaaagtcaaaccaccacgtccccgggccccagagagtgacacaggcgatgaggaccaggaccaggagagggacacggtgttcctgaaggacaaccacctggccattgagcgcaagtgctccagcatcacggtcagctctacgtctagcctggaggctgaggtggacttcacggtcattggtgactaccatggcagcgccttcgaagacttctcccgcagcctgcctgagctcgaccgggacaaaagcgactcggacactgagggcctgctgttctcccgggatctcaacaagggggcccccagccaggatgatgagtctgggggcattgaggacagcccggatcgaggggcctgctccaccccggatatgccccagtttgagcccgtgaaaacagaaaccatgactgtcagcagtctggccattagaaagaagattgagccggaggccgtactgcagaccagagtctccgctatggataacacccaggagaacagtctcaagtccgggaagggggcagctgccatgatcccaggcccacagacggtggccacggaaatccgttctctttctccgatcatcgggaaagatgtcctcaccagcacctacggcgccactgcggaaaccctctcaacctccaccaccacccatgtcaccaaaactgtgaaaggagggttttctgagacaaggatcgagaagcgaatcatcattactggggatgaagatgtcgatcaagaccaggccctggctttggccatcaaggaggccaaactgcagcatcctgatatgctggtaaccaaagctgtcgtatacagagaaacagacccatccccagaggagagggacaagaagccacaggaatcctgacctctgtgaagagatcctggcatttctggtccaacccaagccagagaaccattaagaaggggccttcattctggattctccgacgcaacactgacgtcccagctgcgacgtactgtcactgatgagagactgggaagggaaaagcatatatatatagatatatagagatatagatatatatacaggaaacaccgcatccttgcactgctgctggggctggcagagcagttggctgacagcaacaaccgacatctgaacacctacatttcctttgcagacaaattgaagaactggtgggatttttttcaagaaaaaaaattatataataactataatcccttgctcacccctttcccccgccaaataagaaacgcaagccagaccacgatgattgtagaagtccctcccgccctggttctgcacgttacagttagcagacgagcaattccatttgttcttctccagcatctctaaggcccacttgaatgcaaaggaaaacacttgcacagcaaagcaagagaagtcacagcagcaagacacgcacagtcaaccattttccgagaaaaaaagaaaattccccacttggaaagaaagaggaggaacactggattcttactttctggatcttgacactgggctgcaaaacctaccttcctctctcccgcctcccctcaccctcaactctcaatgtcttgctgtcattttctgtctcggctccctcctcccccttcccccttcccccaccccacacccttcaccctctgtgtcctggtccttctgagggccactgcagatgactctcctttgaaatgagaaaaagaaaagaaagcaagaacagaaaacgaagccacaggaagggaagtagacattgtatgcttatggtttctcattatgaaggtgcagcttgtaggaggtttgtacggatgtgctttgaagttatgtatattacatataacaggaaaaaatattaaaataaacagtgctggtaagtatgaagctgacattctaaaattat

SEQ ID NO: 10058 - protein, 779 aa, Homo sapiens; identical to SEQ ID NO: 1263

SEQ ID NO: 10059 - DNA, 5953 bp, Homo sapiens
cttggctctgtgctgcctggaggggagacctaggataggctcctgatctgcaaaatggggataatcccagctgccacttaagtgagacaagtgcctgactgacagaagttcttgcccccggggagctggtgtggacagaggagggagcctagacatggaggagaaggactacagtgaggccgatggcctttcggagaggaccacgcccagcaaggcccagaaatcgccccagaagattgccaagaaatacaagagtgccatctgccgggtcactctgcttgatgcctcggagtatgagtgtgaggtggagaaacatggccggggccaggtgctgtttgacctggtctgtgaacacctcaacctcctagagaaggactacttcggcctgaccttctgtgatgctgacagccagaagaactggctggacccctccaaggagatcaagaagcagatccggagtagcccctggaattttgccttcacagtcaagttctacccgcctgatcctgcccagctgacagaagacatcacaagatactacctgtgcctgcagctgcgggcagacatcatcacgggccggctgccatgctcctttgtcacgcatgccctactgggctcctacgctgtgcaggctgagctgggtgactatgatgctgaggagcatgtgggcaactatgtcagcgagctccgcttcgcccctaaccagacccgggagctggaggagaggatcatggagctgcataagacatatagggggatgaccccgggagaagcagaaatccacttcttagagaatgccaagaagctttccatgtacggagtagacctgcaccatgccaaggactctgagggcatcgacatcatgttaggcgtttgtgccaatggcctgctcatctaccgggaccggctgagaatcaaccgctttgcctggcccaagatcctcaagatctcctacaagaggagtaacttctatatcaagatccggcctggggagtatgagcaatttgagagcacaattggctttaagctcccaaaccaccggtcagccaagagactgtggaaggtctgcatcgagcatcatacattcttccggctggtgtcccctgagcccccacccaagggcttcctggtgatgggctccaagttccggtacagtgggaggacccaggcacagactcgccaggccagcgccctcattgaccggcctgcacccttctttgagcgttcttccagcaaacggtacaccatgtcccgcagccttgatggagcagagttctcccgcccagcctcggtcagcgagaaccatgatgcagggcctgacggtgacaagcgggatgaggatggcgagtctggggggcaacggtcagaggctgaggagggagaggtcaggactccaaccaagatcaaggagctaaagttcttagacaagccagaagatgtcttgctgaagcaccaggccagcatcaatgagctcaaaaggaccctgaaggagcccaacagcaaactcatccaccgggatcgagactgggaacgggagcgcaggctgccctcctcccccgcctccccctcccccaagggcacccctgagaaagccaatgagagagcagggctgagggagggctccgaggagaaagtcaaaccaccacgtccccgggccccagagagtgacacaggcgatgaggaccaggaccaggagagggacacggtgttcctgaaggacaaccacctggccattgagcgcaagtgctccagcatcacggtcagctctacgtctagcctggaggctgaggtggacttcacggtcattggtgactaccatggcagcgccttcgaagacttctcccgcagcctgcctgagctcgaccgggacaaaagcgactcggacactgagggcctgctgttctcccgggatctcaacaagggggcccccagccaggatgatgagtctgggggcattgaggacagcccggatcgaggggcctgctccaccccggatatgccccagtttgagcccgtgaaaacagaaaccatgactgtcagcagtctggccattagaaagaagattgagccggaggccgtactgcagaccagagtctccgctatggataacacccaggagaacagtctcaagtccgggaagggggcagctgccatgatcccaggcccacagacggtggccacggaaatccgttctctttctccgatcatcgggaaagatgtcctcaccagcacctacggcgccactgcggaaaccctctcaacctccaccaccacccatgtcaccaaaactgtgaaaggagggttttctgagacaaggatcgagaagcgaatcatcattactggggatgaagatgtcgatcaagaccaggccctggctttggccatcaaggaggccaaactgcagcatcctgatatgctggtaaccaaagctgtcgtatacagagaaacagacccatccccagaggagagggacaagaagccacaggaatcctgacctctgtgaagagatcctggcatttctggtccaacccaagccagagaaccattaagaaggggccttcattctggattctccgacgcaacactgacgtcccagctgcgacgtactgtcactgatgagagactgggaagggaaaagcatatatatatagatatatagagatatagatatatatacaggaaacaccgcatccttgcactgctgctggggctggcagagcagttggctgacagcaacaaccgacatctgaacacctacatttcctttgcagacaaattgaagaactggtgggatttttttcaagaaaaaaaattatataataactataatcccttgctcacccctttcccccgccaaataagaaacgcaagccagaccacgatgattgtagaagtccctcccgccctggttctgcacgttacagttagcagacgagcaattccatttgttcttctccagcatctctaaggcccacttgaatgcaaaggaaaacacttgcacagcaaagcaagagaagtcacagcagcaagacacgcacagtcaaccattttccgagaaaaaaagaaaattccccacttggaaagaaagaggaggaacactggattcttactttctggatcttgacactgggctgcaaaacctaccttcctctctcccgcctcccctcaccctcaactctcaatgtcttgctgtcattttctgtctcggctccctcctcccccttcccccttcccccaccccacacccttcaccctctgtgtcctggtccttctgagggccactgcagatgactctcctttgaaatgagaaaaagaaaagaaagcaagaacagaaaacgaagccacaggaagggaagtagacattgtatgcttatggtttctcattatgaaggtgcagcttgtaggaggtttgtacggatgtgctttgaagttatgtatattacatataacaggaaaaaatattaaaataaacagtgctggtaagtatgaagctgacattctaaaattataattatctgactgtgattgatgtatcctgaggttcctagatctcactgaactggcccagctaaggagacctggactctgggtgtgggttggctcacagtaggggctgacgggttcagtgtagtaatactgtgtgtggtgtttgtaattggttgattggtggggaggggtggggggccctaatggagaggtgtgggtttggcaagaaagaagcaacacagatgtcgtccccaaaatgccagttcaagacaccttctccctgcccccctggtagtaacagtcagggcctggtctgtgctcaggtactgggtcccagtctgggactctgctgctgaagttgccacagtagaggtccctggcttagtccttatctccctacggggcttgccttggttttcagtcttctctctctttctctcttttttttttttttgccacattctgcccttccctgaccccattgtaataaccaactccatatccaaagggaggtggtgctctcagccattgtagaagatggtggctttaacctgactgtctaaaaattcccagctaagccttttcctctactctcttccttgttctgaatcatttcttcttctcaggccaaagtagccatggtaaggaggcttcatggggcagaccctgaaagatcaaaactgcatttgcaaagccctcccctgtcccaggacaaagctgagactgacgggtgatgttgctcataggctccagctctgcataagaccttggcttggagacctccctctcagtcaacagctgaactctgagcttgtgcccagaaattaccccaagaccacaggaacccttcaagaagctcccatcacaagcttggcattgctctctgccacacgtgggcttcctcaggcttgtctgccacaagctacttctctgagctcagaaagtgccccttgatgagggaaaatgtcccactgcactgcgaatttctcagttccattttacctcccagtcctccttctaaaccagttaataaattcattccacaagtatttactgattacctgcttgtgccagggactattctcaggctgaagaaggtgggaggggagggcggaacctgaggagccacctgagccagctttatatttcaaccatggctggcccatctgagagcatctccccactctcgccaacctatcggggcatagcccagggatgcccccaggcggcccaggttagatgcgtccctttggcttgtcagtgatgacatacaccttagctgcttagctggtgctggcctgaggcagggcaggaaatcagaatagcatttgcttctctgggcaaatgggaagttcagcggggcagcagaatcagtggcattccccctggtgcaggccggtgggtccactccaactccccctgagtgtagcagcacactttccatacaccaggttctttctacaatcctggtggaaaagccacagaaccttcttcctgcccttcttgagagttccccctctttctgggtcaagagctggagtggtggctccatcctctctgggccacttcggtctaggaactcatctttgcaggaaccaggagtcctgagcacactgaacacacctcagagggaggatccttgttgtggattttgcacctggctttggggcaggggtgaagtgaccaggcttagcttgtggagtttatgggccaccagggtttggggaaatcaccatcccgcggatgctgtgacctcccttctacggagatgcaggcagtgccacgagggaggaggggacctgcaaagctagaatctagggcactgtttcctccccatccttctctttgtagagaatagagacgtttgtcttgtctgtcttcaacctacttttccttttctcttttttgtttctcatcctctctgtgccacctctccacccaggaggccatgtagcatagtggaaaaagtccctgagggcggttaggagttctgggtgaccatcctggctcagctcctaactcaccatgtgacatcaggctatccccattccccctcttgggcctcagtttcccgacttgcaaaataagcagaaagaaccagatgctctccagggtctttttctactttgctatctcatgggtcttcattttctcttattttgttttctctggatcttttccatctgagggtacaggaagtaccaggacctgtttcagtttttgaatcctgcaagcacattccaagactggcctgaaactgcatgagcaacatcactcgaaataattttttttttcaaaagcaccttaacaaccaattgcgatgctgtcctgttcctttttactcacacccttctctcctttctcgtccccatgctcccccacctcagtgctccgtgctgtatgcgtgtgctctctgttcttgtatactcaatataagtgaaataaatgtgtttgatgctgaaccata

SEQ ID NO: 10060 - protein, 779 aa, Homo sapiens; identical to SEQ ID NO: 1263

SEQ ID NO: 10061 - DNA, 6004 bp, Homo sapiens
cattattccgggcacttctggagggcctggccctgccccaggagccctagggcaggaattcctttctttatctatagaaggcagacacttcatccctgccccatcttctttcagatgctatcttgggctcgctgaacacgggtgcctgactgacagaagttcttgcccccggggagctggtgtggacagaggagggagcctagacatggaggagaaggactacagtgaggccgatggcctttcggagaggaccacgcccagcaaggcccagaaatcgccccagaagattgccaagaaatacaagagtgccatctgccgggtcactctgcttgatgcctcggagtatgagtgtgaggtggagaaacatggccggggccaggtgctgtttgacctggtctgtgaacacctcaacctcctagagaaggactacttcggcctgaccttctgtgatgctgacagccagaagaactggctggacccctccaaggagatcaagaagcagatccggagtagcccctggaattttgccttcacagtcaagttctacccgcctgatcctgcccagctgacagaagacatcacaagatactacctgtgcctgcagctgcgggcagacatcatcacgggccggctgccatgctcctttgtcacgcatgccctactgggctcctacgctgtgcaggctgagctgggtgactatgatgctgaggagcatgtgggcaactatgtcagcgagctccgcttcgcccctaaccagacccgggagctggaggagaggatcatggagctgcataagacatatagggggatgaccccgggagaagcagaaatccacttcttagagaatgccaagaagctttccatgtacggagtagacctgcaccatgccaaggactctgagggcatcgacatcatgttaggcgtttgtgccaatggcctgctcatctaccgggaccggctgagaatcaaccgctttgcctggcccaagatcctcaagatctcctacaagaggagtaacttctatatcaagatccggcctggggagtatgagcaatttgagagcacaattggctttaagctcccaaaccaccggtcagccaagagactgtggaaggtctgcatcgagcatcatacattcttccggctggtgtcccctgagcccccacccaagggcttcctggtgatgggctccaagttccggtacagtgggaggacccaggcacagactcgccaggccagcgccctcattgaccggcctgcacccttctttgagcgttcttccagcaaacggtacaccatgtcccgcagccttgatggagcagagttctcccgcccagcctcggtcagcgagaaccatgatgcagggcctgacggtgacaagcgggatgaggatggcgagtctggggggcaacggtcagaggctgaggagggagaggtcaggactccaaccaagatcaaggagctaaagttcttagacaagccagaagatgtcttgctgaagcaccaggccagcatcaatgagctcaaaaggaccctgaaggagcccaacagcaaactcatccaccgggatcgagactgggaacgggagcgcaggctgccctcctcccccgcctccccctcccccaagggcacccctgagaaagccaatgagagagcagggctgagggagggctccgaggagaaagtcaaaccaccacgtccccgggccccagagagtgacacaggcgatgaggaccaggaccaggagagggacacggtgttcctgaaggacaaccacctggccattgagcgcaagtgctccagcatcacggtcagctctacgtctagcctggaggctgaggtggacttcacggtcattggtgactaccatggcagcgccttcgaagacttctcccgcagcctgcctgagctcgaccgggacaaaagcgactcggacactgagggcctgctgttctcccgggatctcaacaagggggcccccagccaggatgatgagtctgggggcattgaggacagcccggatcgaggggcctgctccaccccggatatgccccagtttgagcccgtgaaaacagaaaccatgactgtcagcagtctggccattagaaagaagattgagccggaggccgtactgcagaccagagtctccgctatggataacacccaggagaacagtctcaagtccgggaagggggcagctgccatgatcccaggcccacagacggtggccacggaaatccgttctctttctccgatcatcgggaaagatgtcctcaccagcacctacggcgccactgcggaaaccctctcaacctccaccaccacccatgtcaccaaaactgtgaaaggagggttttctgagacaaggatcgagaagcgaatcatcattactggggatgaagatgtcgatcaagaccaggccctggctttggccatcaaggaggccaaactgcagcatcctgatatgctggtaaccaaagctgtcgtatacagagaaacagacccatccccagaggagagggacaagaagccacaggaatcctgacctctgtgaagagatcctggcatttctggtccaacccaagccagagaaccattaagaaggggccttcattctggattctccgacgcaacactgacgtcccagctgcgacgtactgtcactgatgagagactgggaagggaaaagcatatatatatagatatatagagatatagatatatatacaggaaacaccgcatccttgcactgctgctggggctggcagagcagttggctgacagcaacaaccgacatctgaacacctacatttcctttgcagacaaattgaagaactggtgggatttttttcaagaaaaaaaattatataataactataatcccttgctcacccctttcccccgccaaataagaaacgcaagccagaccacgatgattgtagaagtccctcccgccctggttctgcacgttacagttagcagacgagcaattccatttgttcttctccagcatctctaaggcccacttgaatgcaaaggaaaacacttgcacagcaaagcaagagaagtcacagcagcaagacacgcacagtcaaccattttccgagaaaaaaagaaaattccccacttggaaagaaagaggaggaacactggattcttactttctggatcttgacactgggctgcaaaacctaccttcctctctcccgcctcccctcaccctcaactctcaatgtcttgctgtcattttctgtctcggctccctcctcccccttcccccttcccccaccccacacccttcaccctctgtgtcctggtccttctgagggccactgcagatgactctcctttgaaatgagaaaaagaaaagaaagcaagaacagaaaacgaagccacaggaagggaagtagacattgtatgcttatggtttctcattatgaaggtgcagcttgtaggaggtttgtacggatgtgctttgaagttatgtatattacatataacaggaaaaaatattaaaataaacagtgctggtaagtatgaagctgacattctaaaattataattatctgactgtgattgatgtatcctgaggttcctagatctcactgaactggcccagctaaggagacctggactctgggtgtgggttggctcacagtaggggctgacgggttcagtgtagtaatactgtgtgtggtgtttgtaattggttgattggtggggaggggtggggggccctaatggagaggtgtgggtttggcaagaaagaagcaacacagatgtcgtccccaaaatgccagttcaagacaccttctccctgcccccctggtagtaacagtcagggcctggtctgtgctcaggtactgggtcccagtctgggactctgctgctgaagttgccacagtagaggtccctggcttagtccttatctccctacggggcttgccttggttttcagtcttctctctctttctctcttttttttttttttgccacattctgcccttccctgaccccattgtaataaccaactccatatccaaagggaggtggtgctctcagccattgtagaagatggtggctttaacctgactgtctaaaaattcccagctaagccttttcctctactctcttccttgttctgaatcatttcttcttctcaggccaaagtagccatggtaaggaggcttcatggggcagaccctgaaagatcaaaactgcatttgcaaagccctcccctgtcccaggacaaagctgagactgacgggtgatgttgctcataggctccagctctgcataagaccttggcttggagacctccctctcagtcaacagctgaactctgagcttgtgcccagaaattaccccaagaccacaggaacccttcaagaagctcccatcacaagcttggcattgctctctgccacacgtgggcttcctcaggcttgtctgccacaagctacttctctgagctcagaaagtgccccttgatgagggaaaatgtcccactgcactgcgaatttctcagttccattttacctcccagtcctccttctaaaccagttaataaattcattccacaagtatttactgattacctgcttgtgccagggactattctcaggctgaagaaggtgggaggggagggcggaacctgaggagccacctgagccagctttatatttcaaccatggctggcccatctgagagcatctccccactctcgccaacctatcggggcatagcccagggatgcccccaggcggcccaggttagatgcgtccctttggcttgtcagtgatgacatacaccttagctgcttagctggtgctggcctgaggcagggcaggaaatcagaatagcatttgcttctctgggcaaatgggaagttcagcggggcagcagaatcagtggcattccccctggtgcaggccggtgggtccactccaactccccctgagtgtagcagcacactttccatacaccaggttctttctacaatcctggtggaaaagccacagaaccttcttcctgcccttcttgagagttccccctctttctgggtcaagagctggagtggtggctccatcctctctgggccacttcggtctaggaactcatctttgcaggaaccaggagtcctgagcacactgaacacacctcagagggaggatccttgttgtggattttgcacctggctttggggcaggggtgaagtgaccaggcttagcttgtggagtttatgggccaccagggtttggggaaatcaccatcccgcggatgctgtgacctcccttctacggagatgcaggcagtgccacgagggaggaggggacctgcaaagctagaatctagggcactgtttcctccccatccttctctttgtagagaatagagacgtttgtcttgtctgtcttcaacctacttttccttttctcttttttgtttctcatcctctctgtgccacctctccacccaggaggccatgtagcatagtggaaaaagtccctgagggcggttaggagttctgggtgaccatcctggctcagctcctaactcaccatgtgacatcaggctatccccattccccctcttgggcctcagtttcccgacttgcaaaataagcagaaagaaccagatgctctccagggtctttttctactttgctatctcatgggtcttcattttctcttattttgttttctctggatcttttccatctgagggtacaggaagtaccaggacctgtttcagtttttgaatcctgcaagcacattccaagactggcctgaaactgcatgagcaacatcactcgaaataattttttttttcaaaagcaccttaacaaccaattgcgatgctgtcctgttcctttttactcacacccttctctcctttctcgtccccatgctcccccacctcagtgctccgtgctgtatgcgtgtgctctctgttcttgtatactcaatataagtgaaataaatgtgtttgatgctgaaccata

SEQ ID NO: 10062 - protein, 779 aa, Homo sapiens; identical to SEQ ID NO: 1263

SEQ ID NO: 10063 - DNA, 589 bp, Homo sapiens
agatgctatcttgggctcgctgaacacgggtgcctgactgacagaagttcttgcccccggggagctggtgtggacagaggaggggccctggaagtgaccactgggctgagtagctcatcagcttccccacactgaagcccgaggggtctcctgctggcttctgagagctgacggaacaggttccagcaaggcagaccctgacacagaagccagacctgtccagcagggaccccatacactgggaggcttcctgggaaactggaaggcagaagccacgcagacttctagtcctggttccactgcttactcggctgctgttcgtacctgcctcatggttttcttggggaggatcaatgaggtagaacctgcaaagggcttagcagagagcctagcacctactgagcgctcagtaaaggcgtgctggtcaccatgacaacagagacaggccccgactctgaggtgaagaaagctcaggaggaggccccgcagcagcccgaggctgctgccgctgtgaccacccctgtgacccctgcaggccacggccacccagaggccaactccaatgagaagcatccatcccagcaggaca

SEQ ID NO: 10064 - protein, 33 aa, Homo sapiens
MVFLGRINEVEPAKGLAESLAPTERSVKACWSP

SEQ ID NO: 10065 - DNA, 593 bp, Homo sapiens
gagcgccgtgggagggagagcaggagcgagcgcgcgagagagcggggcatttctgcgcagctctagcgcgcctcggagcccgccggggcagccgccggacaccaggaccgcgagccagacagctcccggaagccgcgccgccgccgccaggtagctccttggatattcctttctgcaagtgatcaggcaaagataaattccattttacagatgaggaagctgaggcctgtgaagggaaagtgacctggctacacagccggaacctgaatgcaggacattctgcccctgtcgtggtggtattggagccagctaatgccaccattcgaggttgcaggagcagcacctgaccagaaatccagagcttgtgcctgactgacagaagttcttgcccccggggagctggtgtggacagaggaggggcgtgctggtcaccatgacaacagagacaggccccgactctgaggtgaagaaagctcaggaggaggccccgcagcagcccgaggctgctgccgctgtgaccacccctgtgacccctgcaggccacggccacccagaggccaactccaatgagaagcatccatcccagcaggaca

SEQ ID NO: 10066 - protein, 34 aa, Homo sapiens [sequence omitted]

SEQ ID NO: 10067 - DNA, 5987 bp, Homo sapiens
cgagcgcgcgagagagcggggcatttctgcgcagctctagcgcgcctcggagcccgccggggcagccgccggacaccaggaccgcgagccagacagctcccggaagccgcgccgccgccgccaggtgcctgactgacagaagttcttgcccccggggagctggtgtggacagaggagggagcctagacatggaggagaaggactacagtgaggccgatggcctttcggagaggaccacgcccagcaaggcccagaaatcgccccagaagattgccaagaaatacaagagtgccatctgccgggtcactctgcttgatgcctcggagtatgagtgtgaggtggagaaacatggccggggccaggtgctgtttgacctggtctgtgaacacctcaacctcctagagaaggactacttcggcctgaccttctgtgatgctgacagccagaagaactggctggacccctccaaggagatcaagaagcagatccggagtagcccctggaattttgccttcacagtcaagttctacccgcctgatcctgcccagctgacagaagacatcacaagatactacctgtgcctgcagctgcgggcagacatcatcacgggccggctgccatgctcctttgtcacgcatgccctactgggctcctacgctgtgcaggctgagctgggtgactatgatgctgaggagcatgtgggcaactatgtcagcgagctccgcttcgcccctaaccagacccgggagctggaggagaggatcatggagctgcataagacatatagggggatgaccccgggagaagcagaaatccacttcttagagaatgccaagaagctttccatgtacggagtagacctgcaccatgccaaggactctgagggcatcgacatcatgttaggcgtttgtgccaatggcctgctcatctaccgggaccggctgagaatcaaccgctttgcctggcccaagatcctcaagatctcctacaagaggagtaacttctatatcaagatccggcctggggagtatgagcaatttgagagcacaattggctttaagctcccaaaccaccggtcagccaagagactgtggaaggtctgcatcgagcatcatacattcttccggctggtgtcccctgagcccccacccaagggcttcctggtgatgggctccaagttccggtacagtgggaggacccaggcacagactcgccaggccagcgccctcattgaccggcctgcacccttctttgagcgttcttccagcaaacggtacaccatgtcccgcagccttgatggagcagagttctcccgcccagcctcggtcagcgagaaccatgatgcagggcctgacggtgacaagcgggatgaggatggcgagtctggggggcaacggtcagaggctgaggagggagaggtcaggactccaaccaagatcaaggagctaaagttcttagacaagccagaagatgtcttgctgaagcaccaggccagcatcaatgagctcaaaaggaccctgaaggagcccaacagcaaactcatccaccgggatcgagactgggaacgggagcgcaggctgccctcctcccccgcctccccctcccccaagggcacccctgagaaagccaatgagagagcagggctgagggagggctccgaggagaaagtcaaaccaccacgtccccgggccccagagagtgacacaggcgatgaggaccaggaccaggagagggacacggtgttcctgaaggacaaccacctggccattgagcgcaagtgctccagcatcacggtcagctctacgtctagcctggaggctgaggtggacttcacggtcattggtgactaccatggcagcgccttcgaagacttctcccgcagcctgcctgagctcgaccgggacaaaagcgactcggacactgagggcctgctgttctcccgggatctcaacaagggggcccccagccaggatgatgagtctgggggcattgaggacagcccggatcgaggggcctgctccaccccggatatgccccagtttgagcccgtgaaaacagaaaccatgactgtcagcagtctggccattagaaagaagattgagccggaggccgtactgcagaccagagtctccgctatggataacacccaggagaacagtctcaagtccgggaagggggcagctgccatgatcccaggcccacagacggtggccacggaaatccgttctctttctccgatcatcgggaaagatgtcctcaccagcacctacggcgccactgcggaaaccctctcaacctccaccaccacccatgtcaccaaaactgtgaaaggagggttttctgagacaaggatcgagaagcgaatcatcattactggggatgaagatgtcgatcaagaccaggccctggctttggccatcaaggaggccaaactgcagcatcctgatatgctggtaaccaaagctgtcgtatacagagaaacagacccatccccagaggagagggacaagaagccacaggaatcctgacctctgtgaagagatcctggcatttctggtccaacccaagccagagaaccattaagaaggggccttcattctggattctccgacgcaacactgacgtcccagctgcgacgtactgtcactgatgagagactgggaagggaaaagcatatatatatagatatatagagatatagatatatatacaggaaacaccgcatccttgcactgctgctggggctggcagagcagttggctgacagcaacaaccgacatctgaacacctacatttcctttgcagacaaattgaagaactggtgggatttttttcaagaaaaaaaattatataataactataatcccttgctcacccctttcccccgccaaataagaaacgcaagccagaccacgatgattgtagaagtccctcccgccctggttctgcacgttacagttagcagacgagcaattccatttgttcttctccagcatctctaaggcccacttgaatgcaaaggaaaacacttgcacagcaaagcaagagaagtcacagcagcaagacacgcacagtcaaccattttccgagaaaaaaagaaaattccccacttggaaagaaagaggaggaacactggattcttactttctggatcttgacactgggctgcaaaacctaccttcctctctcccgcctcccctcaccctcaactctcaatgtcttgctgtcattttctgtctcggctccctcctcccccttcccccttcccccaccccacacccttcaccctctgtgtcctggtccttctgagggccactgcagatgactctcctttgaaatgagaaaaagaaaagaaagcaagaacagaaaacgaagccacaggaagggaagtagacattgtatgcttatggtttctcattatgaaggtgcagcttgtaggaggtttgtacggatgtgctttgaagttatgtatattacatataacaggaaaaaatattaaaataaacagtgctggtaagtatgaagctgacattctaaaattataattatctgactgtgattgatgtatcctgaggttcctagatctcactgaactggcccagctaaggagacctggactctgggtgtgggttggctcacagtaggggctgacgggttcagtgtagtaatactgtgtgtggtgtttgtaattggttgattggtggggaggggtggggggccctaatggagaggtgtgggtttggcaagaaagaagcaacacagatgtcgtccccaaaatgccagttcaagacaccttctccctgcccccctggtagtaacagtcagggcctggtctgtgctcaggtactgggtcccagtctgggactctgctgctgaagttgccacagtagaggtccctggcttagtccttatctccctacggggcttgccttggttttcagtcttctctctctttctctcttttttttttttttgccacattctgcccttccctgaccccattgtaataaccaactccatatccaaagggaggtggtgctctcagccattgtagaagatggtggctttaacctgactgtctaaaaattcccagctaagccttttcctctactctcttccttgttctgaatcatttcttcttctcaggccaaagtagccatggtaaggaggcttcatggggcagaccctgaaagatcaaaactgcatttgcaaagccctcccctgtcccaggacaaagctgagactgacgggtgatgttgctcataggctccagctctgcataagaccttggcttggagacctccctctcagtcaacagctgaactctgagcttgtgcccagaaattaccccaagaccacaggaacccttcaagaagctcccatcacaagcttggcattgctctctgccacacgtgggcttcctcaggcttgtctgccacaagctacttctctgagctcagaaagtgccccttgatgagggaaaatgtcccactgcactgcgaatttctcagttccattttacctcccagtcctccttctaaaccagttaataaattcattccacaagtatttactgattacctgcttgtgccagggactattctcaggctgaagaaggtgggaggggagggcggaacctgaggagccacctgagccagctttatatttcaaccatggctggcccatctgagagcatctccccactctcgccaacctatcggggcatagcccagggatgcccccaggcggcccaggttagatgcgtccctttggcttgtcagtgatgacatacaccttagctgcttagctggtgctggcctgaggcagggcaggaaatcagaatagcatttgcttctctgggcaaatgggaagttcagcggggcagcagaatcagtggcattccccctggtgcaggccggtgggtccactccaactccccctgagtgtagcagcacactttccatacaccaggttctttctacaatcctggtggaaaagccacagaaccttcttcctgcccttcttgagagttccccctctttctgggtcaagagctggagtggtggctccatcctctctgggccacttcggtctaggaactcatctttgcaggaaccaggagtcctgagcacactgaacacacctcagagggaggatccttgttgtggattttgcacctggctttggggcaggggtgaagtgaccaggcttagcttgtggagtttatgggccaccagggtttggggaaatcaccatcccgcggatgctgtgacctcccttctacggagatgcaggcagtgccacgagggaggaggggacctgcaaagctagaatctagggcactgtttcctccccatccttctctttgtagagaatagagacgtttgtcttgtctgtcttcaacctacttttccttttctcttttttgtttctcatcctctctgtgccacctctccacccaggaggccatgtagcatagtggaaaaagtccctgagggcggttaggagttctgggtgaccatcctggctcagctcctaactcaccatgtgacatcaggctatccccattccccctcttgggcctcagtttcccgacttgcaaaataagcagaaagaaccagatgctctccagggtctttttctactttgctatctcatgggtcttcattttctcttattttgttttctctggatcttttccatctgagggtacaggaagtaccaggacctgtttcagtttttgaatcctgcaagcacattccaagactggcctgaaactgcatgagcaacatcactcgaaataattttttttttcaaaagcaccttaacaaccaattgcgatgctgtcctgttcctttttactcacacccttctctcctttctcgtccccatgctcccccacctcagtgctccgtgctgtatgcgtgtgctctctgttcttgtatactcaatataagtgaaataaatgtgtttgatgctgaaccata

SEQ ID NO: 10068 - protein, 779 aa, Homo sapiens; identical to SEQ ID NO: 1263

SEQ ID NO: 10069 - DNA, 3134 bp, Homo sapiens
gcatttctgcgcagctctagcgcgcctcggagcccgccggggcagccgccggacaccaggaccgcgagccagacagctcccggaagccgcgccgccgccgccaggtgcctgactgacagaagttcttgcccccggggagctggtgtggacagaggaggggccctggaagtgaccactgggctgagtagctcatcagcttccccacactgaagcccgaggggtctcctgctggcttctgagagctgacggaacaggttccagcaaggcagaccctgacacagaagccagacctgtccagcagggaccccatacactgagcctagacatggaggagaaggactacagtgaggccgatggcctttcggagaggaccacgcccagcaaggcccagaaatcgccccagaagattgccaagaaatacaagagtgccatctgccgggtcactctgcttgatgcctcggagtatgagtgtgaggtggagaactggctggacccctccaaggagatcaagaagcagatccggagtagcccctggaattttgccttcacagtcaagttctacccgcctgatcctgcccagctgacagaagacatcacaagatactacctgtgcctgcagctgcgggcagacatcatcacgggccggctgccatgctcctttgtcacgcatgccctactgggctcctacgctgtgcaggctgagctgggtgactatgatgctgaggagcatgtgggcaactatgtcagcgagctccgcttcgcccctaaccagacccgggagctggaggagaggatcatggagctgcataagacatatagggggatgaccccgggagaagcagaaatccacttcttagagaatgccaagaagctttccatgtacggagtagacctgcaccatgccaaggactctgagggcatcgacatcatgttaggcgtttgtgccaatggcctgctcatctaccgggaccggctgagaatcaaccgctttgcctggcccaagatcctcaagatctcctacaagaggagtaacttctatatcaagatccggcctggggagtatgagcaatttgagagcacaattggctttaagctcccaaaccaccggtcagccaagagactgtggaaggtctgcatcgagcatcatacattcttccggctggtgtcccctgagcccccacccaagggcttcctggtgatgggctccaagttccggtacagtgggaggacccaggcacagactcgccaggccagcgccctcattgaccggcctgcacccttctttgagcgttcttccagcaaacggtacaccatgtcccgcagccttgatggagcagagttctcccgcccagcctcggtcagcgagaaccatgatgcagggcctgacggtgacaagcgggatgaggatggcgagtctggggggcaacggtcagaggctgaggagggagaggtcaggactccaaccaagatcaaggagctaaagttcttagacaagccagaagatgtcttgctgaagcaccaggccagcatcaatgagctcaaaaggaccctgaaggagcccaacagcaaactcatccaccgggatcgagactgggaacgggagcgcaggctgccctcctcccccgcctccccctcccccaagggcacccctgagaaagccaatgagagagcagggctgagggagggctccgaggagaaagtcaaaccaccacgtccccgggccccagagagtgacacaggcgatgaggaccaggaccaggagagggacacggtgttcctgaaggacaaccacctggccattgagcgcaagtgctccagcatcacggtcagctctacgtctagcctggaggctgaggtggacttcacggtcattggtgactaccatggcagcgccttcgaagacttctcccgcagcctgcctgagctcgaccgggacaaaagcgactcggacactgagggcctgctgttctcccgggatctcaacaagggggcccccagccaggatgatgagtctgggggcattgaggacagcccggatcgaggggcctgctccaccccggatatgccccagtttgagcccgtgaaaacagaaaccatgactgtcagcagtctggccattagaaagaagattgagccggaggccgtactgcagaccagagtctccgctatggataacacccaggttgatgggagtgcctcagtggggagggagttcatagcaaccactccctccatcaccacggagaccatatcgaccaccatggagaacagtctcaagtccgggaagggggcagctgccatgatcccaggcccacagacggtggccacggaaatccgttctctttctccgatcatcgggaaagatgtcctcaccagcacctacggcgccactgcggaaaccctctcaacctccaccaccacccatgtcaccaaaactgtgaaaggagggttttctgagacaaggatcgagaagcgaatcatcattactggggatgaagatgtcgatcaagaccaggccctggctttggccatcaaggaggccaaactgcagcatcctgatatgctggtaaccaaagctgtcgtatacagagaaacagacccatccccagaggagagggacaagaagccacaggaatcctgacctctgtgaagagatcctggcatttctggtccaacccaagccagagaaccattaagaaggggccttcattctggattctccgacgcaacactgacgtcccagctgcgacgtactgtcactgatgagagactgggaagggaaaagcatatatatatagatatatagagatatagatatatatacaggaaacaccgcatccttgcactgctgctggggctggcagagcagttggctgacagcaacaaccgacatctgaacacctacatttcctttgcagacaaattgaagaactggtgggatttttttcaaaaaagaaagcaagaacagaaaacgaagccacaggaagggaagtagacattgtatgcttatggtttctcattatgaaggtgcagcttgtaggaggtttgtacggatgtgctttgaagttatgtatattacatataacaggaaaaaatattaaaataaacagtgctggtaagtatgaagctgacat

SEQ ID NO: 10070 - protein, 771 aa, Homo sapiens
MEEKDYSEADGLSERTTPSKAQKSPQKIAKKYKSAICRVTLLDASEYECEVENWLDPSKEIKKQIRSSPWNFAFTVKFYPPDPAQLTEDITRYYLCLQLRADIITGRLPCSFVTHALLGSYAVQAELGDYDAEEHVGNYVSELRFAPNQTRELEERIMELHKTYRGMTPGEAEIHFLENAKKLSMYGVDLHHAKDSEGIDIMLGVCANGLLIYRDRLRINRFAWPKILKISYKRSNFYIKIRPGEYEQFESTIGFKLPNHRSAKRLWKVCIEHHTFFRLVSPEPPPKGFLVMGSKFRYSGRTQAQTRQASALIDRPAPFFERSSSKRYTMSRSLDGAEFSRPASVSENHDAGPDGDKRDEDGESGGQRSEAEEGEVRTPTKIKELKFLDKPEDVLLKHQASINELKRTLKEPNSKLIHRDRDWERERRLPSSPASPSPKGTPEKANERAGLREGSEEKVKPPRPRAPESDTGDEDQDQERDTVFLKDNHLAIERKCSSITVSSTSSLEAEVDFTVIGDYHGSAFEDFSRSLPELDRDKSDSDTEGLLFSRDLNKGAPSQDDESGGIEDSPDRGACSTPDMPQFEPVKTETMTVSSLAIRKKIEPEAVLQTRVSAMDNTQVDGSASVGREFIATTPSITTETISTTMENSLKSGKGAAAMIPGPQTVATEIRSLSPIIGKDVLTSTYGATAETLSTSTTTHVTKTVKGGFSETRIEKRIIITGDEDVDQDQALALAIKEAKLQHPDMLVTKAVVYRETDPSPEERDKKPQES

SEQ ID NO: 10071 - DNA, 5589 bp, Homo sapiens
gcatttctgcgcagctctagcgcgcctcggagcccgccggggcagccgccggacaccaggaccgcgagccagacagctcccggaagccgcgccgccgccgccaggtgcctgactgacagaagttcttgcccccggggagctggtgtggacagaggaggggccctggaagtgaccactgggctgagtagctcatcagcttccccacactgaagcccgaggggtctcctgctggcttctgagagctgacggaacaggttccagcaaggcagaccctgacacagaagccagacctgtccagcagggaccccatacactgagcctagacatggaggagaaggactacagtgaggccgatggcctttcggagaggaccacgcccagcaaggcccagaaatcgccccagaagattgccaagaaatacaagagtgccatctgccgggtcactctgcttgatgcctcggagtatgagtgtgaggtggagaactggctggacccctccaaggagatcaagaagcagatccggagtagcccctggaattttgccttcacagtcaagttctacccgcctgatcctgcccagctgacagaagacatcacaagatactacctgtgcctgcagctgcgggcagacatcatcacgggccggctgccatgctcctttgtcacgcatgccctactgggctcctacgctgtgcaggctgagctgggtgactatgatgctgaggagcatgtgggcaactatgtcagcgagctccgcttcgcccctaaccagacccgggagctggaggagaggatcatggagctgcataagacatatagggggatgaccccgggagaagcagaaatccacttcttagagaatgccaagaagctttccatgtacggagtagacctgcaccatgccaaggactctgagggcatcgacatcatgttaggcgtttgtgccaatggcctgctcatctaccgggaccggctgagaatcaaccgctttgcctggcccaagatcctcaagatctcctacaagaggagtaacttctatatcaagatccggcctggggagtatgagcaatttgagagcacaattggctttaagctcccaaaccaccggtcagccaagagactgtggaaggtctgcatcgagcatcatacattcttccggctggtgtcccctgagcccccacccaagggcttcctggtgatgggctccaagttccggtacagtgggaggacccaggcacagactcgccaggccagcgccctcattgaccggcctgcacccttctttgagcgttcttccagcaaacggtacaccatgtcccgcagccttgatggagcagagttctcccgcccagcctcggtcagcgagaaccatgatgcagggcctgacggtgacaagcgggatgaggatggcgagtctggggggcaacggtcagaggctgaggagggagaggtcaggactccaaccaagatcaaggagctaaagttcttagacaagccagaagatgtcttgctgaagcaccaggccagcatcaatgagctcaaaaggaccctgaaggagcccaacagcaaactcatccaccgggatcgagactgggaacgggagcgcaggctgccctcctcccccgcctccccctcccccaagggcacccctgagaaagccaatgagagagcagggctgagggagggctccgaggagaaagtcaaaccaccacgtccccgggccccagagagtgacacaggcgatgaggaccaggaccaggagagggacacggtgttcctgaaggacaaccacctggccattgagcgcaagtgctccagcatcacggtcagctctacgtctagcctggaggctgaggtggacttcacggtcattggtgactaccatggcagcgccttcgaagacttctcccgcagcctgcctgagctcgaccgggacaaaagcgactcggacactgagggcctgctgttctcccgggatctcaacaagggggcccccagccaggatgatgagtctgggggcattgaggacagcccggatcgaggggcctgctccaccccggatatgccccagtttgagcccgtgaaaacagaaaccatgactgtcagcagtctggccattagaaagaagattgagccggaggccgtactgcagaccagagtctccgctatggataacacccaggttgatgggagtgcctcagtggggagggagttcatagcaaccactccctccatcaccacggagaccatatcgaccaccatggagaacagtctcaagtccgggaagggggcagctgccatgatcccaggcccacagacggtggccacggaaatccgttctctttctccgatcatcgggaaagatgtcctcaccagcacctacggcgccactgcggaaaccctctcaacctccaccaccacccatgtcaccaaaactgtgaaaggagggttttctgagacaaggatcgagaagcgaatcatcattactggggatgaagatgtcgatcaagaccaggccctggctttggccatcaaggaggccaaactgcagcatcctgatatgctggtaaccaaagctgtcgtatacagagaaacagacccatccccagaggagagggacaagaagccacaggaatcctgacctctgtgaagagatcctggcatttctggtccaacccaagccagagaaccattaagaaggggccttcattctggattctccgacgcaacactgacgtcccagctgcgacgtactgtcactgatgagagactgggaagggaaaagcatatatatatagatatatagagatatagatatatatacaggaaacaccgcatccttgcactgctgctggggctggcagagcagttggctgacagcaacaaccgacatctgaacacctacatttcctttgcagacaaattgaagaactggtgggatttttttcaaaaaagaaagcaagaacagaaaacgaagccacaggaagggaagtagacattgtatgcttatggtttctcattatgaaggtgcagcttgtaggaggtttgtacggatgtgctttgaagttatgtatattacatataacaggaaaaaatattaaaataaacagtgctggtaagtatgaagctgacattctaaaattataattatctgactgtgattgatgtatcctgaggttcctagatctcactgaactggcccagctaaggagacctggactctgggtgtgggttggctcacagtaggggctgacgggttcagtgtagtaatactgtgtgtggtgtttgtaattggttgattggtggggaggggtggggggccctaatggagaggtgtgggtttggcaagaaagaagcaacacagatgtcgtccccaaaatgccagttcaagacaccttctccctgcccccctggtagtaacagtcagggcctggtctgtgctcaggtactgggtcccagtctgggactctgctgctgaagttgccacagtagaggtccctggcttagtccttatctccctacggggcttgccttggttttcagtcttctctctctttctctcttttttttttttttgccacattctgcccttccctgaccccattgtaataaccaactccatatccaaagggaggtggtgctctcagccattgtagaagatggtggctttaacctgactgtctaaaaattcccagctaagccttttcctctactctcttccttgttctgaatcatttcttcttctcaggccaaagtagccatggtaaggaggcttcatggggcagaccctgaaagatcaaaactgcatttgcaaagccctcccctgtcccaggacaaagctgagactgacgggtgatgttgctcataggctccagctctgcataagaccttggcttggagacctccctctcagtcaacagctgaactctgagcttgtgcccagaaattaccccaagaccacaggaacccttcaagaagctcccatcacaagcttggcattgctctctgccacacgtgggcttcctcaggcttgtctgccacaagctacttctctgagctcagaaagtgccccttgatgagggaaaatgtcccactgcactgcgaatttctcagttccattttacctcccagtcctccttctaaaccagttaataaattcattccacaagtatttactgattacctgcttgtgccagggactattctcaggctgaagaaggtgggaggggagggcggaacctgaggagccacctgagccagctttatatttcaaccatggctggcccatctgagagcatctccccactctcgccaacctatcggggcatagcccagggatgcccccaggcggcccaggttagatgcgtccctttggcttgtcagtgatgacatacaccttagctgcttagctggtgctggcctgaggcagggcaggaaatcagaatagcatttgcttctctgggcaaatgggaagttcagcggggcagcagaatcagtggcattccccctggtgcaggccggtgggtccactccaactccccctgagtgtagcagcacactttccatacaccaggttctttctacaatcctggtggaaaagccacagaaccttcttcctgcccttcttgagagttccccctctttctgggtcaagagctggagtggtggctccatcctctctgggccacttcggtctaggaactcatctttgcaggaaccaggagtcctgagcacactgaacacacctcagagggaggatccttgttgtggattttgcacctggctttggggcaggggtgaagtgaccaggcttagcttgtggagtttatgggccaccagggtttggggaaatcaccatcccgcggatgctgtgacctcccttctacggagatgcaggcagtgccacgagggaggaggggacctgcaaagctagaatctagggcactgtttcctccccatccttctctttgtagagaatagagacgtttgtcttgtctgtcttcaacctacttttccttttctcttttttgtttctcatcctctctgtgccacctctccacccaggaggccatgtagcatagtggaaaaagtccctgagggcggttaggagttctgggtgaccatcctggctcagctcctaactcaccatgtgacatcaggctatccccattccccctcttgggcctcagtttcccgacttgcaaaataagcagaaagaaccagatgctctccagggtctttttctactttgctatctcatgggtcttcattttctcttattttgttttctctggatcttttccatctgagggtacaggaagtaccaggacctgtttcagtttttgaatcctgcaagcacattccaagactggcctgaaactgcatgagcaacatcactcgaaataattttttttttcaaaagcaccttaacaaccaattgcgatgctgtcctgttcctttttactcacacccttctctcctttctcgtccccatgctcccccacctcagtgctccgtgctgtatgcgtgtgctctctgttcttgtatactcaatataagtgaaataaatgtgtttgatgctgaaccata

SEQ ID NO: 10072 - protein, 771 aa, Homo sapiens; identical to SEQ ID NO: 10070

SEQ ID NO: 10073 - DNA, 3296 bp, Homo sapiens
atttctgcgcagctctagcgcgcctcggagcccgccggggcagccgccggacaccaggaccgcgagccagacagctcccggaagccgcgccgccgccgccaggtgcctgactgacagaagttcttgcccccggggagctggtgtggacagaggaggggctgctgttcgtacctgcctcatggttttcttggggaggatcaatgaggtagaacctgcaaagggcttagcagagagcctagcacctactgagcgctcagtaaagagcctagacatggaggagaaggactacagtgaggccgatggcctttcggagaggaccacgcccagcaaggcccagaaatcgccccagaagattgccaagaaatacaagagtgccatctgccgggtcactctgcttgatgcctcggagtatgagtgtgaggtggagaaacatggccggggccaggtgctgtttgacctggtctgtgaacacctcaacctcctagagaaggactacttcggcctgaccttctgtgatgctgacagccagaagaactggctggacccctccaaggagatcaagaagcagatccggagtagcccctggaattttgccttcacagtcaagttctacccgcctgatcctgcccagctgacagaagacatcacaagatactacctgtgcctgcagctgcgggcagacatcatcacgggccggctgccatgctcctttgtcacgcatgccctactgggctcctacgctgtgcaggctgagctgggtgactatgatgctgaggagcatgtgggcaactatgtcagcgagctccgcttcgcccctaaccagacccgggagctggaggagaggatcatggagctgcataagacatatagggggatgaccccgggagaagcagaaatccacttcttagagaatgccaagaagctttccatgtacggagtagacctgcaccatgccaaggactctgagggcatcgacatcatgttaggcgtttgtgccaatggcctgctcatctaccgggaccggctgagaatcaaccgctttgcctggcccaagatcctcaagatctcctacaagaggagtaacttctatatcaagatccggcctggggagtatgagcaatttgagagcacaattggctttaagctcccaaaccaccggtcagccaagagactgtggaaggtctgcatcgagcatcatacattcttccggctggtgtcccctgagcccccacccaagggcttcctggtgatgggctccaagttccggtacagtgggaggacccaggcacagactcgccaggccagcgccctcattgaccggcctgcacccttctttgagcgttcttccagcaaacggtacaccatgtcccgcagccttgatggagcagagttctcccgcccagcctcggtcagcgagaaccatgatgcagggcctgacggtgacaagcgggatgaggatggcgagtctggggggcaacggtcagaggctgaggagggagaggtcaggactccaaccaagatcaaggagctaaagttcttagacaagccagaagatgtcttgctgaagcaccaggccagcatcaatgagctcaaaaggaccctgaaggagcccaacagcaaactcatccaccgggatcgagactgggaacgggagcgcaggctgccctcctcccccgcctccccctcccccaagggcacccctgagaaagccaatgagcccgtgaaaacagaaaccatgactgtcagcagtctggccattagaaagaagattgagccggaggccgtactgcagaccagagtctccgctatggataacacccaggttgatgggagtgcctcagtggggagggagttcatagcaaccactccctccatcaccacggagaccatatcgaccaccatggagaacagtctcaagtccgggaagggggcagctgccatgatcccaggcccacagacggtggccacggaaatccgttctctttctccgatcatcgggaaagatgtcctcaccagcacctacggcgccactgcggaaaccctctcaacctccaccaccacccatgtcaccaaaactgtgaaaggagggttttctgagacaaggatcgagaagcgaatcatcattactggggatgaagatgtcgatcaagaccaggccctggctttggccatcaaggaggccaaactgcagcatcctgatatgctggtaaccaaagctgtcgtatacagagaaacagacccatccccagaggagagggacaagaagccacaggaatcctgacctctgtgaagagatcctggcatttctggtccaacccaagccagagaaccattaagaaggggccttcattctggattctccgacgcaacactgacgtcccagctgcgacgtactgtcactgatgagagactgggaagggaaaagcatatatatatagatatatagagatatagatatatatacaggaaacaccgcatccttgcactgctgctggggctggcagagcagttggctgacagcaacaaccgacatctgaacacctacatttcctttgcagacaaattgaagaactggtgggatttttttcaagaaaaaaaattatataataactataatcccttgctcacccctttcccccgccaaataagaaacgcaagccagaccacgatgattgtagaagtccctcccgccctggttctgcacgttacagttagcagacgagcaattccatttgttcttctccagcatctctaaggcccacttgaatgcaaaggaaaacacttgcacagcaaagcaagagaagtcacagcagcaagacacgcacagtcaaccattttccgagaaaaaaagaaaattccccacttggaaagaaagaggaggaacactggattcttactttctggatcttgacactgggctgcaaaacctaccttcctctctcccgcctcccctcaccctcaactctcaatgtcttgctgtcattttctgtctcggctccctcctcccccttcccccttcccccaccccacacccttcaccctctgtgtcctggtccttctgagggccactgcagatgactctcctttgaaatgagaaaaagaaaagaaagcaagaacagaaaacgaagccacaggaagggaagtagacattgtatgcttatggtttctcattatgaaggtgcagcttgtaggaggtttgtacggatgtgctttgaagttatgtatattacatataacaggaaaaaatattaaaataaacagtgctggtaagtatgaagctgacattctaaaattat

SEQ ID NO: 10074 - protein, 700 aa, Homo sapiens
MVFLGRINEVEPAKGLAESLAPTERSVKSLDMEEKDYSEADGLSERTTPSKAQKSPQKIAKKYKSAICRVTLLDASEYECEVEKHGRGQVLFDLVCEHLNLLEKDYFGLTFCDADSQKNWLDPSKEIKKQIRSSPWNFAFTVKFYPPDPAQLTEDITRYYLCLQLRADIITGRLPCSFVTHALLGSYAVQAELGDYDAEEHVGNYVSELRFAPNQTRELEERIMELHKTYRGMTPGEAEIHFLENAKKLSMYGVDLHHAKDSEGIDIMLGVCANGLLIYRDRLRINRFAWPKILKISYKRSNFYIKIRPGEYEQFESTIGFKLPNHRSAKRLWKVCIEHHTFFRLVSPEPPPKGFLVMGSKFRYSGRTQAQTRQASALIDRPAPFFERSSSKRYTMSRSLDGAEFSRPASVSENHDAGPDGDKRDEDGESGGQRSEAEEGEVRTPTKIKELKFLDKPEDVLLKHQASINELKRTLKEPNSKLIHRDRDWERERRLPSSPASPSPKGTPEKANEPVKTETMTVSSLAIRKKIEPEAVLQTRVSAMDNTQVDGSASVGREFIATTPSITTETISTTMENSLKSGKGAAAMIPGPQTVATEIRSLSPIIGKDVLTSTYGATAETLSTSTTTHVTKTVKGGFSETRIEKRIIITGDEDVDQDQALALAIKEAKLQHPDMLVTKAVVYRETDPSPEERDKKPQES

SEQ ID NO: 10075 - DNA, 5740 bp, Homo sapiens
atttctgcgcagctctagcgcgcctcggagcccgccggggcagccgccggacaccaggaccgcgagccagacagctcccggaagccgcgccgccgccgccaggtgcctgactgacagaagttcttgcccccggggagctggtgtggacagaggaggggctgctgttcgtacctgcctcatggttttcttggggaggatcaatgaggtagaacctgcaaagggcttagcagagagcctagcacctactgagcgctcagtaaagagcctagacatggaggagaaggactacagtgaggccgatggcctttcggagaggaccacgcccagcaaggcccagaaatcgccccagaagattgccaagaaatacaagagtgccatctgccgggtcactctgcttgatgcctcggagtatgagtgtgaggtggagaaacatggccggggccaggtgctgtttgacctggtctgtgaacacctcaacctcctagagaaggactacttcggcctgaccttctgtgatgctgacagccagaagaactggctggacccctccaaggagatcaagaagcagatccggagtagcccctggaattttgccttcacagtcaagttctacccgcctgatcctgcccagctgacagaagacatcacaagatactacctgtgcctgcagctgcgggcagacatcatcacgggccggctgccatgctcctttgtcacgcatgccctactgggctcctacgctgtgcaggctgagctgggtgactatgatgctgaggagcatgtgggcaactatgtcagcgagctccgcttcgcccctaaccagacccgggagctggaggagaggatcatggagctgcataagacatatagggggatgaccccgggagaagcagaaatccacttcttagagaatgccaagaagctttccatgtacggagtagacctgcaccatgccaaggactctgagggcatcgacatcatgttaggcgtttgtgccaatggcctgctcatctaccgggaccggctgagaatcaaccgctttgcctggcccaagatcctcaagatctcctacaagaggagtaacttctatatcaagatccggcctggggagtatgagcaatttgagagcacaattggctttaagctcccaaaccaccggtcagccaagagactgtggaaggtctgcatcgagcatcatacattcttccggctggtgtcccctgagcccccacccaagggcttcctggtgatgggctccaagttccggtacagtgggaggacccaggcacagactcgccaggccagcgccctcattgaccggcctgcacccttctttgagcgttcttccagcaaacggtacaccatgtcccgcagccttgatggagcagagttctcccgcccagcctcggtcagcgagaaccatgatgcagggcctgacggtgacaagcgggatgaggatggcgagtctggggggcaacggtcagaggctgaggagggagaggtcaggactccaaccaagatcaaggagctaaagttcttagacaagccagaagatgtcttgctgaagcaccaggccagcatcaatgagctcaaaaggaccctgaaggagcccaacagcaaactcatccaccgggatcgagactgggaacgggagcgcaggctgccctcctcccccgcctccccctcccccaagggcacccctgagaaagccaatgagcccgtgaaaacagaaaccatgactgtcagcagtctggccattagaaagaagattgagccggaggccgtactgcagaccagagtctccgctatggataacacccaggttgatgggagtgcctcagtggggagggagttcatagcaaccactccctccatcaccacggagaccatatcgaccaccatggagaacagtctcaagtccgggaagggggcagctgccatgatcccaggcccacagacggtggccacggaaatccgttctctttctccgatcatcgggaaagatgtcctcaccagcacctacggcgccactgcggaaaccctctcaacctccaccaccacccatgtcaccaaaactgtgaaaggagggttttctgagacaaggatcgagaagcgaatcatcattactggggatgaagatgtcgatcaagaccaggccctggctttggccatcaaggaggccaaactgcagcatcctgatatgctggtaaccaaagctgtcgtatacagagaaacagacccatccccagaggagagggacaagaagccacaggaatcctgacctctgtgaagagatcctggcatttctggtccaacccaagccagagaaccattaagaaggggccttcattctggattctccgacgcaacactgacgtcccagctgcgacgtactgtcactgatgagagactgggaagggaaaagcatatatatatagatatatagagatatagatatatatacaggaaacaccgcatccttgcactgctgctggggctggcagagcagttggctgacagcaacaaccgacatctgaacacctacatttcctttgcagacaaattgaagaactggtgggatttttttcaagaaaaaaaattatataataactataatcccttgctcacccctttcccccgccaaataagaaacgcaagccagaccacgatgattgtagaagtccctcccgccctggttctgcacgttacagttagcagacgagcaattccatttgttcttctccagcatctctaaggcccacttgaatgcaaaggaaaacacttgcacagcaaagcaagagaagtcacagcagcaagacacgcacagtcaaccattttccgagaaaaaaagaaaattccccacttggaaagaaagaggaggaacactggattcttactttctggatcttgacactgggctgcaaaacctaccttcctctctcccgcctcccctcaccctcaactctcaatgtcttgctgtcattttctgtctcggctccctcctcccccttcccccttcccccaccccacacccttcaccctctgtgtcctggtccttctgagggccactgcagatgactctcctttgaaatgagaaaaagaaaagaaagcaagaacagaaaacgaagccacaggaagggaagtagacattgtatgcttatggtttctcattatgaaggtgcagcttgtaggaggtttgtacggatgtgctttgaagttatgtatattacatataacaggaaaaaatattaaaataaacagtgctggtaagtatgaagctgacattctaaaattataattatctgactgtgattgatgtatcctgaggttcctagatctcactgaactggcccagctaaggagacctggactctgggtgtgggttggctcacagtaggggctgacgggttcagtgtagtaatactgtgtgtggtgtttgtaattggttgattggtggggaggggtggggggccctaatggagaggtgtgggtttggcaagaaagaagcaacacagatgtcgtccccaaaatgccagttcaagacaccttctccctgcccccctggtagtaacagtcagggcctggtctgtgctcaggtactgggtcccagtctgggactctgctgctgaagttgccacagtagaggtccctggcttagtccttatctccctacggggcttgccttggttttcagtcttctctctctttctctcttttttttttttttgccacattctgcccttccctgaccccattgtaataaccaactccatatccaaagggaggtggtgctctcagccattgtagaagatggtggctttaacctgactgtctaaaaattcccagctaagccttttcctctactctcttccttgttctgaatcatttcttcttctcaggccaaagtagccatggtaaggaggcttcatggggcagaccctgaaagatcaaaactgcatttgcaaagccctcccctgtcccaggacaaagctgagactgacgggtgatgttgctcataggctccagctctgcataagaccttggcttggagacctccctctcagtcaacagctgaactctgagcttgtgcccagaaattaccccaagaccacaggaacccttcaagaagctcccatcacaagcttggcattgctctctgccacacgtgggcttcctcaggcttgtctgccacaagctacttctctgagctcagaaagtgccccttgatgagggaaaatgtcccactgcactgcgaatttctcagttccattttacctcccagtcctccttctaaaccagttaataaattcattccacaagtatttactgattacctgcttgtgccagggactattctcaggctgaagaaggtgggaggggagggcggaacctgaggagccacctgagccagctttatatttcaaccatggctggcccatctgagagcatctccccactctcgccaacctatcggggcatagcccagggatgcccccaggcggcccaggttagatgcgtccctttggcttgtcagtgatgacatacaccttagctgcttagctggtgctggcctgaggcagggcaggaaatcagaatagcatttgcttctctgggcaaatgggaagttcagcggggcagcagaatcagtggcattccccctggtgcaggccggtgggtccactccaactccccctgagtgtagcagcacactttccatacaccaggttctttctacaatcctggtggaaaagccacagaaccttcttcctgcccttcttgagagttccccctctttctgggtcaagagctggagtggtggctccatcctctctgggccacttcggtctaggaactcatctttgcaggaaccaggagtcctgagcacactgaacacacctcagagggaggatccttgttgtggattttgcacctggctttggggcaggggtgaagtgaccaggcttagcttgtggagtttatgggccaccagggtttggggaaatcaccatcccgcggatgctgtgacctcccttctacggagatgcaggcagtgccacgagggaggaggggacctgcaaagctagaatctagggcactgtttcctccccatccttctctttgtagagaatagagacgtttgtcttgtctgtcttcaacctacttttccttttctcttttttgtttctcatcctctctgtgccacctctccacccaggaggccatgtagcatagtggaaaaagtccctgagggcggttaggagttctgggtgaccatcctggctcagctcctaactcaccatgtgacatcaggctatccccattccccctcttgggcctcagtttcccgacttgcaaaataagcagaaagaaccagatgctctccagggtctttttctactttgctatctcatgggtcttcattttctcttattttgttttctctggatcttttccatctgagggtacaggaagtaccaggacctgtttcagtttttgaatcctgcaagcacattccaagactggcctgaaactgcatgagcaacatcactcgaaataattttttttttcaaaagcaccttaacaaccaattgcgatgctgtcctgttcctttttactcacacccttctctcctttctcgtccccatgctcccccacctcagtgctccgtgctgtatgcgtgtgctctctgttcttgtatactcaatataagtgaaataaatgtgtttgatgctgaaccata

SEQ ID NO: 10076 - protein, 700 aa, Homo sapiens; identical to SEQ ID NO: 10074

SEQ ID NO: 10077 - DNA, 3861 bp, Homo sapiens
cgcctcggagcccgccggggcagccgccggacaccaggaccgcgagccagacagctcccggaagccgcgccgccgccgccagccacagcacagccggacagaggaggtggattaggagttcccgggagggagcctgctcagcctttccctgacatttgggcaaatgtgtggggagatgcggagctcaaggcgtgctggtcaccatgacaacagagacaggccccgactctgaggtgaagaaagctcaggaggaggccccgcagcagcccgaggctgctgccgctgtgaccacccctgtgacccctgcaggccacggccacccagaggccaactccaatgagaagcatccatcccagcaggacacgcggcctgctgaacagagcctagacatggaggagaaggactacagtgaggccgatggcctttcggagaggaccacgcccagcaaggcccagaaatcgccccagaagattgccaagaaatacaagagtgccatctgccgggtcactctgcttgatgcctcggagtatgagtgtgaggtggagaaacatggccggggccaggtgctgtttgacctggtctgtgaacacctcaacctcctagagaaggactacttcggcctgaccttctgtgatgctgacagccagaagaactggctggacccctccaaggagatcaagaagcagatccggagtagcccctggaattttgccttcacagtcaagttctacccgcctgatcctgcccagctgacagaagacatcacaagatactacctgtgcctgcagctgcgggcagacatcatcacgggccggctgccatgctcctttgtcacgcatgccctactgggctcctacgctgtgcaggctgagctgggtgactatgatgctgaggagcatgtgggcaactatgtcagcgagctccgcttcgcccctaaccagacccgggagctggaggagaggatcatggagctgcataagacatatagggggatgaccccgggagaagcagaaatccacttcttagagaatgccaagaagctttccatgtacggagtagacctgcaccatgccaaggactctgagggcatcgacatcatgttaggcgtttgtgccaatggcctgctcatctaccgggaccggctgagaatcaaccgctttgcctggcccaagatcctcaagatctcctacaagaggagtaacttctatatcaagatccggcctggggagtatgagcaatttgagagcacaattggctttaagctcccaaaccaccggtcagccaagagactgtggaaggtctgcatcgagcatcatacattcttccggctggtgtcccctgagcccccacccaagggcttcctggtgatgggctccaagttccggtacagtgggaggacccaggcacagactcgccaggccagcgccctcattgaccggcctgcacccttctttgagcgttcttccagcaaacggtacaccatgtcccgcagccttgatggagcagagttctcccgcccagcctcggtcagcgagaaccatgatgcagggcctgacggtgacaagcgggatgaggatggcgagtctggggggcaacggtcagaggctgaggagggagaggtcaggactccaaccaagatcaaggagctaaagccggagcaggaaaccacgccgagacacaagcaggagttcttagacaagccagaagatgtcttgctgaagcaccaggccagcatcaatgagctcaaaaggaccctgaaggagcccaacagcaaactcatccaccgggatcgagactgggaacgggagcgcaggctgccctcctcccccgcctccccctcccccaagggcacccctgagaaagccaatgagagagcagggctgagggagggctccgaggagaaagtcaaaccaccacgtccccgggccccagagagtgacacaggcgatgaggaccaggaccaggagagggacacggtgttcctgaaggacaaccacctggccattgagcgcaagtgctccagcatcacggtcagctctacgtctagcctggaggctgaggtggacttcacggtcattggtgactaccatggcagcgccttcgaagacttctcccgcagcctgcctgagctcgaccgggacaaaagcgactcggacactgagggcctgctgttctcccgggatctcaacaagggggcccccagccaggatgatgagtctgggggcattgaggacagcccggatcgaggggcctgctccaccccggatatgccccagtttgagcccgtgaaaacagaaaccatgactgtcagcagtctggccattagaaagaagattgagccggaggccgtactgcagaccagagtctccgctatggataacacccaggttgatgggagtgcctcagtggggagggagttcatagcaaccactccctccatcaccacggagaccatatcgaccaccatggagaacagtctcaagtccgggaagggggcagctgccatgatcccaggcccacagacggtggccacggaaatccgttctctttctccgatcatcgggaaagatgtcctcaccagcacctacggcgccactgcggaaaccctctcaacctccaccaccacccatgtcaccaaaactgtgaaaggagggttttctgagacaaggatcgagaagcgaatcatcattactggggatgaagatgtcgatcaagaccaggccctggctttggccatcaaggaggccaaactgcagcatcctgatatgctggtaaccaaagctgtcgtatacagagaaacagacccatccccagaggagagggacaagaagccacaggaatcctgacctctgtgaagagatcctggcatttctggtccaacccaagccagagaaccattaagaaggggccttcattctggattctccgacgcaacactgacgtcccagctgcgacgtactgtcactgatgagagactgggaagggaaaagcatatatatatagatatatagagatatagatatatatacaggaaacaccgcatccttgcactgctgctggggctggcagagcagttggctgacagcaacaaccgacatctgaacacctacatttcctttgcagacaaattgaagaactggtgggatttttttcaagaaaaaaaattatataataactataatcccttgctcacccctttcccccgccaaataagaaacgcaagccagaccacgatgattgtagaagtccctcccgccctggttctgcacgttacagttagcagacgagcaattccatttgttcttctccagcatctctaaggcccacttgaatgcaaaggaaaacacttgcacagcaaagcaagagaagtcacagcagcaagacacgcacagtcaaccattttccgagaaaaaaagaaaattccccacttggaaagaaagaggaggaacactggattcttactttctggatcttgacactgggctgcaaaacctaccttcctctctcccgcctcccctcaccctcaactctcaatgtcttgctgtcattttctgtctcggctccctcctcccccttcccccttcccccaccccacacccttcaccctctgtgtcctggtccttctgagggccactgcagatgactctcctttgaaatgagaaaaagaaaagaaagcaagaacagaaaacgaagccacaggaagggaagtagacattgtatgcttatggtttctcattatgaaggtgcagcttgtaggaggtttgtacggatgtgctttgaagttatgtatattacatataacaggaaaaaatattaaaataaacagtgctggtaagtatgaagctgacattctaaaattat

SEQ ID NO: 10078 - protein, 880 aa, Homo sapiens
MTTETGPDSEVKKAQEEAPQQPEAAAAVTTPVTPAGHGHPEANSNEKHPSQQDTRPAEQSLDMEEKDYSEADGLSERTTPSKAQKSPQKIAKKYKSAICRVTLLDASEYECEVEKHGRGQVLFDLVCEHLNLLEKDYFGLTFCDADSQKNWLDPSKEIKKQIRSSPWNFAFTVKFYPPDPAQLTEDITRYYLCLQLRADIITGRLPCSFVTHALLGSYAVQAELGDYDAEEHVGNYVSELRFAPNQTRELEERIMELHKTYRGMTPGEAEIHFLENAKKLSMYGVDLHHAKDSEGIDIMLGVCANGLLIYRDRLRINRFAWPKILKISYKRSNFYIKIRPGEYEQFESTIGFKLPNHRSAKRLWKVCIEHHTFFRLVSPEPPPKGFLVMGSKFRYSGRTQAQTRQASALIDRPAPFFERSSSKRYTMSRSLDGAEFSRPASVSENHDAGPDGDKRDEDGESGGQRSEAEEGEVRTPTKIKELKPEQETTPRHKQEFLDKPEDVLLKHQASINELKRTLKEPNSKLIHRDRDWERERRLPSSPASPSPKGTPEKANERAGLREGSEEKVKPPRPRAPESDTGDEDQDQERDTVFLKDNHLAIERKCSSITVSSTSSLEAEVDFTVIGDYHGSAFEDFSRSLPELDRDKSDSDTEGLLFSRDLNKGAPSQDDESGGIEDSPDRGACSTPDMPQFEPVKTETMTVSSLAIRKKIEPEAVLQTRVSAMDNTQVDGSASVGREFIATTPSITTETISTTMENSLKSGKGAAAMIPGPQTVATEIRSLSPIIGKDVLTSTYGATAETLSTSTTTHVTKTVKGGFSETRIEKRIIITGDEDVDQDQALALAIKEAKLQHPDMLVTKAVVYRETDPSPEERDKKPQES

SEQ ID NO: 10079 - DNA, 521 bp, Homo sapiens
gttagccgcacccgccgtccccctccgcgtcccggggaccccgccgcgtcgggtcccgcgtgtgcgtgtggggtggccgccgagggcggcgggctcgattcccgatctttgggcactgacaggccggcgggccggctccaggagccgcgggcttcgagacggggtttcaccgtgttagccaggatggtctcaatctcctgacgtcatgatccgcctgcctcggcctcccaaagtgctgggattacaggtgtgagccactgcacccggccgagttcagggcttctgatggcaaatgaaaaaccttggtctgggtcctcatcctggccacgcccttcacttgctctgtgtgtgaccttgggcaattctctttgctgaacttgagcctttcatctgcaaactgagactaatggtggttgaggggatggcctgagaaataatccaactccttggatattcctttctgcaagtgatcaggcaaagataaattccattttacagatgaggaagctgaggcctgtgaa

SEQ ID NO: 10080 - protein, 58 aa, Homo sapiens [sequence omitted]

SEQ ID NO: 10081 - DNA, 5886 bp, Homo sapiens
tctgtctcttctgcaaccaccctagcttaggccctcatcatatctccgctggataatcacaacaacctcctaactgatgttcctgcagcttcccctgcccctcttccatcctctaccctgtaagccagtggtttctctttgctcttacaataaagagcgaatcttctccttggcctccaaggtccttcgctgcctggcccctgctgccgcttcaggtgcatatttgttactttctattttgctttccgccttgtcacaaggcctttttgtttaacaggttcagcaacttccctaaggtgcctcagagagtcaaatgccagcctctcaatttccagcacatgctgggctcatgaactcctgttctgaggagctaacgctgtttcctccctctaggtgcctgactgacagaagttcttgcccccggggagctggtgtggacagaggagggggaggcttcctgggaaactggaaggcagaagccacgcagacttctagtcctggttccactgcttactcggcgtgctggtcaccatgacaacagagacaggccccgactctgaggtgaagaaagctcaggaggaggccccgcagcagcccgaggctgctgccgctgtgaccacccctgtgacccctgcaggccacggccacccagaggccaactccaatgagaagcatccatcccagcaggacacgcggcctgctgaacagagcctagacatggaggagaaggactacagtgaggccgatggcctttcggagaggaccacgcccagcaaggcccagaaatcgccccagaagattgccaagaaatacaagagtgccatctgccgggtcactctgcttgatgcctcggagtatgagtgtgaggtggagaaacatggccggggccaggtgctgtttgacctggtctgtgaacacctcaacctcctagagaaggactacttcggcctgaccttctgtgatgctgacagccagaagaactggctggacccctccaaggagatcaagaagcagatccggagtagcccctggaattttgccttcacagtcaagttctacccgcctgatcctgcccagctgacagaagacatcacaagggggatgaccccgggagaagcagaaatccacttcttagagaatgccaagaagctttccatgtacggagtagacctgcaccatgccaaggactctgagggcatcgacatcatgttaggcgtttgtgccaatggcctgctcatctaccgggaccggctgagaatcaaccgctttgcctggcccaagatcctcaagatctcctacaagaggagtaacttctatatcaagatccggcctggggagtatgagcaatttgagagcacaattggctttaagctcccaaaccaccggtcagccaagagactgtggaaggtctgcatcgagcatcatacattcttccggctggtgtcccctgagcccccacccaagggcttcctggtgatgggctccaagttccggtacagtgggaggacccaggcacagactcgccaggccagcgccctcattgaccggcctgcacccttctttgagcgttcttccagcaaacggtacaccatgtcccgcagccttgatggagcagagttctcccgcccagcctcggtcagcgagaaccatgatgcagggcctgacggtgacaagcgggatgaggatggcgagtctggggggcaacggtcagaggctgaggagggagaggtcaggactccaaccaagatcaaggagctaaagttcttagacaagccagaagatgtcttgctgaagcaccaggccagcatcaatgagctcaaaaggaccctgaaggagcccaacagcaaactcatccaccgggatcgagactgggaacgggagcgcaggctgccctcctcccccgcctccccctcccccaagggcacccctgagaaagccaatgagcccgtgaaaacagaaaccatgactgtcagcagtctggccattagaaagaagattgagccggaggccgtactgcagaccagagtctccgctatggataacacccaggagaacagtctcaagtccgggaagggggcagctgccatgatcccaggcccacagacggtggccacggaaatccgttctctttctccgatcatcgggaaagatgtcctcaccagcacctacggcgccactgcggaaaccctctcaacctccaccaccacccatgtcaccaaaactgtgaaaggagggttttctgagacaaggatcgagaagcgaatcatcattactggggatgaagatgtcgatcaagaccaggccctggctttggccatcaaggaggccaaactgcagcatcctgatatgctggtaaccaaagctgtcgtatacagagaaacagacccatccccagaggagagggacaagaagccacaggaatcctgacctctgtgaagagatcctggcatttctggtccaacccaagccagagaaccattaagaaggggccttcattctggattctccgacgcaacactgacgtcccagctgcgacgtactgtcactgatgagagactgggaagggaaaagcatatatatatagatatatagagatatagatatatatacaggaaacaccgcatccttgcactgctgctggggctggcagagcagttggctgacagcaacaaccgacatctgaacacctacatttcctttgcagacaaattgaagaactggtgggatttttttcaagaaaaaaaattatataataactataatcccttgctcacccctttcccccgccaaataagaaacgcaagccagaccacgatgattgtagaagtccctcccgccctggttctgcacgttacagttagcagacgagcaattccatttgttcttctccagcatctctaaggcccacttgaatgcaaaggaaaacacttgcacagcaaagcaagagaagtcacagcagcaagacacgcacagtcaaccattttccgagaaaaaaagaaaattccccacttggaaagaaagaggaggaacactggattcttactttctggatcttgacactgggctgcaaaacctaccttcctctctcccgcctcccctcaccctcaactctcaatgtcttgctgtcattttctgtctcggctccctcctcccccttcccccttcccccaccccacacccttcaccctctgtgtcctggtccttctgagggccactgcagatgactctcctttgaaatgagaaaaagaaaagaaagcaagaacagaaaacgaagccacaggaagggaagtagacattgtatgcttatggtttctcattatgaaggtgcagcttgtaggaggtttgtacggatgtgctttgaagttatgtatattacatataacaggaaaaaatattaaaataaacagtgctggtaagtatgaagctgacattctaaaattataattatctgactgtgattgatgtatcctgaggttcctagatctcactgaactggcccagctaaggagacctggactctgggtgtgggttggctcacagtaggggctgacgggttcagtgtagtaatactgtgtgtggtgtttgtaattggttgattggtggggaggggtggggggccctaatggagaggtgtgggtttggcaagaaagaagcaacacagatgtcgtccccaaaatgccagttcaagacaccttctccctgcccccctggtagtaacagtcagggcctggtctgtgctcaggtactgggtcccagtctgggactctgctgctgaagttgccacagtagaggtccctggcttagtccttatctccctacggggcttgccttggttttcagtcttctctctctttctctcttttttttttttttgccacattctgcccttccctgaccccattgtaataaccaactccatatccaaagggaggtggtgctctcagccattgtagaagatggtggctttaacctgactgtctaaaaattcccagctaagccttttcctctactctcttccttgttctgaatcatttcttcttctcaggccaaagtagccatggtaaggaggcttcatggggcagaccctgaaagatcaaaactgcatttgcaaagccctcccctgtcccaggacaaagctgagactgacgggtgatgttgctcataggctccagctctgcataagaccttggcttggagacctccctctcagtcaacagctgaactctgagcttgtgcccagaaattaccccaagaccacaggaacccttcaagaagctcccatcacaagcttggcattgctctctgccacacgtgggcttcctcaggcttgtctgccacaagctacttctctgagctcagaaagtgccccttgatgagggaaaatgtcccactgcactgcgaatttctcagttccattttacctcccagtcctccttctaaaccagttaataaattcattccacaagtatttactgattacctgcttgtgccagggactattctcaggctgaagaaggtgggaggggagggcggaacctgaggagccacctgagccagctttatatttcaaccatggctggcccatctgagagcatctccccactctcgccaacctatcggggcatagcccagggatgcccccaggcggcccaggttagatgcgtccctttggcttgtcagtgatgacatacaccttagctgcttagctggtgctggcctgaggcagggcaggaaatcagaatagcatttgcttctctgggcaaatgggaagttcagcggggcagcagaatcagtggcattccccctggtgcaggccggtgggtccactccaactccccctgagtgtagcagcacactttccatacaccaggttctttctacaatcctggtggaaaagccacagaaccttcttcctgcccttcttgagagttccccctctttctgggtcaagagctggagtggtggctccatcctctctgggccacttcggtctaggaactcatctttgcaggaaccaggagtcctgagcacactgaacacacctcagagggaggatccttgttgtggattttgcacctggctttggggcaggggtgaagtgaccaggcttagcttgtggagtttatgggccaccagggtttggggaaatcaccatcccgcggatgctgtgacctcccttctacggagatgcaggcagtgccacgagggaggaggggacctgcaaagctagaatctagggcactgtttcctccccatccttctctttgtagagaatagagacgtttgtcttgtctgtcttcaacctacttttccttttctcttttttgtttctcatcctctctgtgccacctctccacccaggaggccatgtagcatagtggaaaaagtccctgagggcggttaggagttctgggtgaccatcctggctcagctcctaactcaccatgtgacatcaggctatccccattccccctcttgggcctcagtttcccgacttgcaaaataagcagaaagaaccagatgctctccagggtctttttctactttgctatctcatgggtcttcattttctcttattttgttttctctggatcttttccatctgagggtacaggaagtaccaggacctgtttcagtttttgaatcctgcaagcacattccaagactggcctgaaactgcatgagcaacatcactcgaaataattttttttttcaaaagcaccttaacaaccaattgcgatgctgtcctgttcctttttactcacacccttctctcctttctcgtccccatgctcccccacctcagtgctccgtgctgtatgcgtgtgctctctgttcttgtatactcaatataagtgaaataaatgtgtttgatgctgaaccata

SEQ ID NO: 10082 - protein, 631 aa, Homo sapiens
MTTETGPDSEVKKAQEEAPQQPEAAAAVTTPVTPAGHGHPEANSNEKHPSQQDTRPAEQSLDMEEKDYSEADGLSERTTPSKAQKSPQKIAKKYKSAICRVTLLDASEYECEVEKHGRGQVLFDLVCEHLNLLEKDYFGLTFCDADSQKNWLDPSKEIKKQIRSSPWNFAFTVKFYPPDPAQLTEDITRGMTPGEAEIHFLENAKKLSMYGVDLHHAKDSEGIDIMLGVCANGLLIYRDRLRINRFAWPKILKISYKRSNFYIKIRPGEYEQFESTIGFKLPNHRSAKRLWKVCIEHHTFFRLVSPEPPPKGFLVMGSKFRYSGRTQAQTRQASALIDRPAPFFERSSSKRYTMSRSLDGAEFSRPASVSENHDAGPDGDKRDEDGESGGQRSEAEEGEVRTPTKIKELKFLDKPEDVLLKHQASINELKRTLKEPNSKLIHRDRDWERERRLPSSPASPSPKGTPEKANEPVKTETMTVSSLAIRKKIEPEAVLQTRVSAMDNTQENSLKSGKGAAAMIPGPQTVATEIRSLSPIIGKDVLTSTYGATAETLSTSTTTHVTKTVKGGFSETRIEKRIIITGDEDVDQDQALALAIKEAKLQHPDMLVTKAVVYRETDPSPEERDKKPQES

SEQ ID NO: 10083 - DNA, 625 bp, Homo sapiens
tttccagcacatgctgggctcatgaactcctgttctgaggagctaacgctgtttcctccctctaggtgcctgactgacagaagttcttgcccccggggagctggtgtggacagaggaggggccctggaagtgaccactgggctgagtagctcatcagcttccccacactgaagcccgaggggtctcctgctggcttctgagagctgacggaacaggttccagcaaggcagaccctgacacagaagccagacctgtccagcagggaccccatacactgggaggcttcctgggaaactggaaggcagaagccacgcagacttctagtcctggttccactgcttactcggctgctgttcgtacctgcctcatggttttcttggggaggatcaatgaggtagaacctgcaaagggcttagcagagagcctagcacctactgagcgctcagtaaaggcgtgctggtcaccatgacaacagagacaggccccgactctgaggtgaagaaagctcaggaggaggccccgcagcagcccgaggctgctgccgctgtgaccacccctgtgacccctgcaggccacggccacccagaggccaactccaatgagaagcatccatcccagcaggaca

SEQ ID NO: 10084 - protein, 49 aa, Homo sapiens
MNSCSEELTLFPPSRCLTDRSSCPRGAGVDRGGALEVTTGLSSSSASPH

SEQ ID NO: 10085 - DNA, 534 bp, Homo sapiens
aacatcccatccctgcctcccaccacacctgtgacagacagtggccaggtctggctgctgcctctagaccccagaggtggagagaggctaggtcacaaagctaaaaactaaaccaggctctgaaggccaactaagaagtcctctctgaccctcaacctgaaatgctggaattccttcaagaaggattggagaaatccagggactccagagactgtaagagtcacagaagaaatactggatgtctggaccttacgtgggcaacattcctgaggcctgagtcccccagagacacccctccagctctcaggcaggcagcaatccaggacgaatgatctgctaccatgtagaagagaggatggagagcagctagggtagccagagtcagcatttcagagccactgccacaggaggaggaattggtgggcaagagcaggggagggaaggggcagttttccatgttgagtctccacacttatgtccctccttcagcagacaatggcacagccattcatatttcatgtgacaactgcattt

SEQ ID NO: 10086 - protein, 56 aa, Homo sapiens
MLEFLQEGLEKSRDSRDCKSHRRNTGCLDLTWATFLRPESPRDTPPALRQAAIQDE

SEQ ID NO: 10087 - DNA, 1753 bp, Homo sapiens
atggtacgtaacaaatgatccaatttctacaaaatacgttttttgttcttttttcttttctttttttttttttttgagatggagtttttgctctattgcccaggctgaagtgcagtggcatgatctcggctcactgcaacctccgcctcctgggttcaagcaattctcccacctcagcctcccgagtaattgggattacaggtgccccgccaccacgcctggttaatttttgtatttttagaagagacagggtttcaccatgttggccaggctggtctcgaactcctgacctcaagtgatctgtccacgtcagcactttgggaggccaaggtggttggatcacttgaggccaggagttcaagaccagcacggccaacatggcgaaacctcatccctactaaaaaaaaaaaaaaaaaaacatacaaaaagtagccaggtgtggtggcgcgcacctgtagtccctgctactcaggaggctgaggcacaagaatcacttgaatctgggaagcagaggttgcagtgagcagagattgcgcttctgcactccagcctgggtgacagagcgagactctgtctcaaaaacaaacaaacaaacaacaacaacaaaaaaaaaccacctaggccgggcacggtggctcatgcctgcaatcccagcactttgggaggccaaggtgggcggatcacctgaggtcgggagttcgagaccagctgaccaacatggagaaactccatctctactaaaaatacaaaattagccaggcatggtggcacatgcctgtaatctcagctactcaggaggttgaggcaagagaatcgcttgaacccaggaggcagaggttgcggtgagcccagatcgtaccattgcactccagcctgggcaacaagagtgaaactccgtcttaaaaaaaataaataaataataataagaagaaagcacttaatcctatccctttactgcacagatggggaaactgagacccagagaggggaagggctttgtaatcagtcagcatctatttatttactgagcaacaactaggtctgaagcgctgagctagtgctgtgaatgaggaaaaatttaaacttctgtgttattggatagacaagctgtgactctatgtattaatcattgctaaacctaggcaatgggttcacagaagtgcattacactatactctttatttttatgtatgtttgaaattttgcataacaaaaaaattttttttaaaggatgacagaaagataactgactatcatgcaaaccgtaagtctggcttgaacttataaaactcgaaacaaatttaggaatatttttgctctgatagttttgaaaatcagaaaaaggcaattgtactggaatctacttcatagcctttcttttcccacctttctgtaaaattttctgcctctgttgttgctaggaaatcagtgagccaagagaatcctcgttggcctagccgggccgtctcccttcccacactgcctctctgggggtacagcgtccctgtacccaggaagctggccctcttgggccggctttctgtggatccacaaggcaatcaccacaagaggctgaataagagcctgtcagtcactgggagacaggcagctataaatccagaggaccatgattagaaagcaaattacaggcctcccgctctaagtttccaactcacaaaacttcttggcagtcaaagggcctttacttaagttgttcaaagtttccagagagagtgaacacacacaaggcaag

SEQ ID NO: 10088 - protein, 59 aa, Homo sapiens
MISAHCNLRLLGSSNSPTSASRVIGITGAPPPRLVNFCIFRRDRVSPCWPGWSRTPDLK

SEQ ID NO: 10089 - DNA, 478 bp, Homo sapiens
accaatgcatcctcagagctccgagggaaaagcaacgacgatggctggcagctgagggagagaccagcatccccagaactcccttttggtccttgtccagacttcaaggtctccatggaccactttgagccatatacgtctgccagtcagtggcctctgcacccacgtcagaagcagcagaaatccaaagagcccttggcctctggaggcggcagcaggagtgctctccgaaaagagactgggccagccggtgggagcccagcgcccacccaccgctcatcctacagcaggaccaaccccccgccaacccccagcctccggatcctctctccaggccttggaggaggctgcagaccggtttagatactctggggtcctaactcagcccatagggatcagaaaaggcttcctggaggagaagacactaagccaagctgggttaaagccaagccccctgtacatgtctgggcatcccaga

SEQ ID NO: 10090 - protein, 82 aa, Homo sapiens
MDHFEPYTSASQWPLHPRQKQQKSKEPLASGGGSRSALRKETGPAGGSPAPTHRSSYSRTNPPPTPSLRILSPGLGGGCRPV

SEQ ID NO: 10091 - DNA, 2887 bp, Homo sapiens
atgcctagcccttggcagagtcctgtctatagcacaaccaccgcagcagggaagccagcacctgagctgcaagagccccagaacaagaggtggaagacctggaggaggtgctatgcggatccagaagtgaatgtgggaacacgtggtgctctctcccccaccaatgcatcctcagagctccgagggaaaagcaacgacgatggctggcagctgagggagagaccagcatccccagaactcccttttggtccttgtccagacttcaaggtctccatggaccactttgagccatatacgtctgccagtcagtggcctctgcacccacgtcagaagcagcagaaatccaaagagcccttggcctctggaggcggcagcaggagtgctctccgaaaagagactgggccagccggtgggagcccagcgcccacccaccgctcatcctacagcaggaccaaccccccgccaacccccagcctccggatcctctctccaggccttggaggaggctgcagaccggtgtctttagacaaagcttccggtgccttcactccccctgctcaccaggttcagcagcggatgaagagcagagagcagaatgaagccagcttctcccagtcctagagaacaggcccaccctccagacagaagatgcacagctgctaagagattcttgactgcctgccttcaagtattttgattccaaataggctcagtctcccctgctggctgagccttcccaatcgtgggctcccgtgggcaggaggctctgggctgcatggccaaggctctctctgttcctcttagttcaactctccttccctggccatctccctttccttccttcccccaggctgaagccctccccactcctcccctggggcagggccactttcccaccctcctcaaccagatggagcctctcactttcccaggagaatccaggctacactccaaagaccgaggcaggatgttcccagacatcgttctgcatttatacccaaagggctcaattcacttcaggtcattgagaccacacagaaaatgaggcttctgctattttaattattttgattattattattattcactaacatttctattagcactttccagtttgcaaaatacttttgtgtgtcatctgcacagcatcttgtgagataatatcatccctcatctttttttttttcttttttgagacggagtctcgctctgttgcccaggctggagtgcagtggcgcgatctcggctcactgcaagctccgcctctcgggttcacgccattctcctgcctcagcctcccgagtagctgggactacaggcgcctgccaccaccatgcccagctaatttttttttgcatttttagtagagatggggtttcaccatgttagccaggatggtctcgatctcctgacctcgtgatccgcccgcctcggcctcccaaagtgctgggattacaggcgtgagccaccgcgcccggcccccatcttataaataggcaggctgaggctcagagtgggagtgacttgcccaaggttacgcttacacagttacactggctccctggactacatactttccactttacccaacaataaccctttccagaaaaatcaggctggaggaagcaggagagacacttaagaatgtatggcccccataggcatcagttgcaattactacttgagttacttgactgttttcattccccaggcagggaaactgaggcacagggataggactcaacctaggaccaagtctcatggagaaagaaggaaagaggagcccatccaaaaaaggggttcctcagttccttagctgcaaattctgcttccagccctagcgctaccatttctttttgtattacttaggcaggttatttgacatctctgagcctcaattttctcacctataaaatgggagaatccctgccccatgtctgtcactgggctgctgtgatgggaggtcagcagatgctggcagaagagaagggacaggacccttcattccctctctgctctgtctaggaggcaggagaaattctttcctcttaaattttaactggatggaacttaatggtgcaaaagtccaggatacaggaaagccaggaggagaacggaagtgattcgctccactggctgggaaagcaagggacacagagtcagccacagacccccaaggtcactgcggggcagagattcaaccaaacacttcaggcagggcccctcctatctcccttttatctttcaaaggaggaaaccaaggttctaagcaaagcagtgacttgccaaggtcacccacaagtagtcagtggtctcctgactcccagccaccagggcccttgactactgggcaagcagggtggggtggggagcactcccagcccaaggacttaatctttcattcagcaagcagtaatgctcacaccaagccaggccctggacactggggaaggctggaggaattgaatacagcctctgcccttgaattcacaatcaatctagtggaggcacgtaccccagcacatcagaggatactagaaggtgaagcaccaccattttctgagcacttcctctgtgcctggcactggacacacattcatttgtttaatcctcaaagcaattctctggcactgaaattattaatccctttcacagctgaagtaactgaggctcagaagggttagcgaccccaaagttcatccagctaataaatggcagggtcggaatatgactgacaggtatgtctggtgccaaactctgagcttcaacccttataaactccctgtttttaggtctgtgctaaccaatatggtagctactagccatggctagttgctatggagcacttgaaatgtggctcgttcaaataaaaatgtgctgtaaatat

SEQ ID NO: 10092 - protein, 206 aa, Homo sapiens
MPSPWQSPVYSTTTAAGKPAPELQEPQNKRWKTWRRCYADPEVNVGTRGALSPTNASSELRGKSNDDGWQLRERPASPELPFGPCPDFKVSMDHFEPYTSASQWPLHPRQKQQKSKEPLASGGGSRSALRKETGPAGGSPAPTHRSSYSRTNPPPTPSLRILSPGLGGGCRPVSLDKASGAFTPPAHQVQQRMKSREQNEASFSQS

SEQ ID NO: 10093 - DNA, 6273 bp, Homo sapiens
agtcggcatccatcagcgggcgggggtgtcgccgaacaggctgctccgcagagcccgccgcgaccccgcgccgccccgccccgcggcctgcctgccagaggagccgagggggccgcccctcgcccaacctgcccgacatggggaaccccgggcccaggcgtgctggtcaccatgacaacagagacaggccccgactctgaggtgaagaaagctcaggaggaggccccgcagcagcccgaggctgctgccgctgtgaccacccctgtgacccctgcaggccacggccacccagaggccaactccaatgagaagcatccatcccagcaggacacgcggcctgctgaacagagcctagacatggaggagaaggactacagtgaggccgatggcctttcggagaggaccacgcccagcaaggcccagaaatcgccccagaagattgccaagaaatacaagagtgccatctgccgggtcactctgcttgatgcctcggagtatgagtgtgaggtggagaaacatggccggggccaggtgctgtttgacctggtctgtgaacacctcaacctcctagagaaggactacttcggcctgaccttctgtgatgctgacagccagaagaactggctggacccctccaaggagatcaagaagcagatccggagtagcccctggaattttgccttcacagtcaagttctacccgcctgatcctgcccagctgacagaagacatcacaagatactacctgtgcctgcagctgcgggcagacatcatcacgggccggctgccatgctcctttgtcacgcatgccctactgggctcctacgctgtgcaggctgagctgggtgactatgatgctgaggagcatgtgggcaactatgtcagcgagctccgcttcgcccctaaccagacccgggagctggaggagaggatcatggagctgcataagacatatagggggatgaccccgggagaagcagaaatccacttcttagagaatgccaagaagctttccatgtacggagtagacctgcaccatgccaaggactctgagggcatcgacatcatgttaggcgtttgtgccaatggcctgctcatctaccgggaccggctgagaatcaaccgctttgcctggcccaagatcctcaagatctcctacaagaggagtaacttctatatcaagatccggcctggggagtatgagcaatttgagagcacaattggctttaagctcccaaaccaccggtcagccaagagactgtggaaggtctgcatcgagcatcatacattcttccggctggtgtcccctgagcccccacccaagggcttcctggtgatgggctccaagttccggtacagtgggaggacccaggcacagactcgccaggccagcgccctcattgaccggcctgcacccttctttgagcgttcttccagcaaacggtacaccatgtcccgcagccttgatggagcagagttctcccgcccagcctcggtcagcgagaaccatgatgcagggcctgacggtgacaagcgggatgaggatggcgagtctggggggcaacggtcagaggctgaggagggagaggtcaggactccaaccaagatcaaggagctaaagccggagcaggaaaccacgccgagacacaagcaggagttcttagacaagccagaagatgtcttgctgaagcaccaggccagcatcaatgagctcaaaaggaccctgaaggagcccaacagcaaactcatccaccgggatcgagactgggaacgggagcgcaggctgccctcctcccccgcctccccctcccccaagggcacccctgagaaagccaatgagagagcagggctgagggagggctccgaggagaaagtcaaaccaccacgtccccgggccccagagagtgacacaggcgatgaggaccaggaccaggagagggacacggtgttcctgaaggacaaccacctggccattgagcgcaagtgctccagcatcacggtcagctctacgtctagcctggaggctgaggtggacttcacggtcattggtgactaccatggcagcgccttcgaagacttctcccgcagcctgcctgagctcgaccgggacaaaagcgactcggacactgagggcctgctgttctcccgggatctcaacaagggggcccccagccaggatgatgagtctgggggcattgaggacagcccggatcgaggggcctgctccaccccggatatgccccagtttgagcccgtgaaaacagaaaccatgactgtcagcagtctggccattagaaagaagattgagccggaggccgtactgcagaccagagtctccgctatggataacacccaggttgatgggagtgcctcagtggggagggagttcatagcaaccactccctccatcaccacggagaccatatcgaccaccatggagaacagtctcaagtccgggaagggggcagctgccatgatcccaggcccacagacggtggccacggaaatccgttctctttctccgatcatcgggaaagatgtcctcaccagcacctacggcgccactgcggaaaccctctcaacctccaccaccacccatgtcaccaaaactgtgaaaggagggttttctgagacaaggatcgagaagcgaatcatcattactggggatgaagatgtcgatcaagaccaggccctggctttggccatcaaggaggccaaactgcagcatcctgatatgctggtaaccaaagctgtcgtatacagagaaacagacccatccccagaggagagggacaagaagccacaggaatcctgacctctgtgaagagatcctggcatttctggtccaacccaagccagagaaccattaagaaggggccttcattctggattctccgacgcaacactgacgtcccagctgcgacgtactgtcactgatgagagactgggaagggaaaagcatatatatatagatatatagagatatagatatatatacaggaaacaccgcatccttgcactgctgctggggctggcagagcagttggctgacagcaacaaccgacatctgaacacctacatttcctttgcagacaaattgaagaactggtgggatttttttcaagaaaaaaaattatataataactataatcccttgctcacccctttcccccgccaaataagaaacgcaagccagaccacgatgattgtagaagtccctcccgccctggttctgcacgttacagttagcagacgagcaattccatttgttcttctccagcatctctaaggcccacttgaatgcaaaggaaaacacttgcacagcaaagcaagagaagtcacagcagcaagacacgcacagtcaaccattttccgagaaaaaaagaaaattccccacttggaaagaaagaggaggaacactggattcttactttctggatcttgacactgggctgcaaaacctaccttcctctctcccgcctcccctcaccctcaactctcaatgtcttgctgtcattttctgtctcggctccctcctcccccttcccccttcccccaccccacacccttcaccctctgtgtcctggtccttctgagggccactgcagatgactctcctttgaaatgagaaaaagaaaagaaagcaagaacagaaaacgaagccacaggaagggaagtagacattgtatgcttatggtttctcattatgaaggtgcagcttgtaggaggtttgtacggatgtgctttgaagttatgtatattacatataacaggaaaaaatattaaaataaacagtgctggtaagtatgaagctgacattctaaaattataattatctgactgtgattgatgtatcctgaggttcctagatctcactgaactggcccagctaaggagacctggactctgggtgtgggttggctcacagtaggggctgacgggttcagtgtagtaatactgtgtgtggtgtttgtaattggttgattggtggggaggggtggggggccctaatggagaggtgtgggtttggcaagaaagaagcaacacagatgtcgtccccaaaatgccagttcaagacaccttctccctgcccccctggtagtaacagtcagggcctggtctgtgctcaggtactgggtcccagtctgggactctgctgctgaagttgccacagtagaggtccctggcttagtccttatctccctacggggcttgccttggttttcagtcttctctctctttctctcttttttttttttttgccacattctgcccttccctgaccccattgtaataaccaactccatatccaaagggaggtggtgctctcagccattgtagaagatggtggctttaacctgactgtctaaaaattcccagctaagccttttcctctactctcttccttgttctgaatcatttcttcttctcaggccaaagtagccatggtaaggaggcttcatggggcagaccctgaaagatcaaaactgcatttgcaaagccctcccctgtcccaggacaaagctgagactgacgggtgatgttgctcataggctccagctctgcataagaccttggcttggagacctccctctcagtcaacagctgaactctgagcttgtgcccagaaattaccccaagaccacaggaacccttcaagaagctcccatcacaagcttggcattgctctctgccacacgtgggcttcctcaggcttgtctgccacaagctacttctctgagctcagaaagtgccccttgatgagggaaaatgtcccactgcactgcgaatttctcagttccattttacctcccagtcctccttctaaaccagttaataaattcattccacaagtatttactgattacctgcttgtgccagggactattctcaggctgaagaaggtgggaggggagggcggaacctgaggagccacctgagccagctttatatttcaaccatggctggcccatctgagagcatctccccactctcgccaacctatcggggcatagcccagggatgcccccaggcggcccaggttagatgcgtccctttggcttgtcagtgatgacatacaccttagctgcttagctggtgctggcctgaggcagggcaggaaatcagaatagcatttgcttctctgggcaaatgggaagttcagcggggcagcagaatcagtggcattccccctggtgcaggccggtgggtccactccaactccccctgagtgtagcagcacactttccatacaccaggttctttctacaatcctggtggaaaagccacagaaccttcttcctgcccttcttgagagttccccctctttctgggtcaagagctggagtggtggctccatcctctctgggccacttcggtctaggaactcatctttgcaggaaccaggagtcctgagcacactgaacacacctcagagggaggatccttgttgtggattttgcacctggctttggggcaggggtgaagtgaccaggcttagcttgtggagtttatgggccaccagggtttggggaaatcaccatcccgcggatgctgtgacctcccttctacggagatgcaggcagtgccacgagggaggaggggacctgcaaagctagaatctagggcactgtttcctccccatccttctctttgtagagaatagagacgtttgtcttgtctgtcttcaacctacttttccttttctcttttttgtttctcatcctctctgtgccacctctccacccaggaggccatgtagcatagtggaaaaagtccctgagggcggttaggagttctgggtgaccatcctggctcagctcctaactcaccatgtgacatcaggctatccccattccccctcttgggcctcagtttcccgacttgcaaaataagcagaaagaaccagatgctctccagggtctttttctactttgctatctcatgggtcttcattttctcttattttgttttctctggatcttttccatctgagggtacaggaagtaccaggacctgtttcagtttttgaatcctgcaagcacattccaagactggcctgaaactgcatgagcaacatcactcgaaataattttttttttcaaaagcaccttaacaaccaattgcgatgctgtcctgttcctttttactcacacccttctctcctttctcgtccccatgctcccccacctcagtgctccgtgctgtatgcgtgtgctctctgttcttgtatactcaatataagtgaaataaatgtgtttgatgctgaaccata

SEQ ID NO: 10094 - protein, 880 aa, Homo sapiens; identical to SEQ ID NO: 10078

SEQ ID NO: 10095 - DNA, 2764 bp, Homo sapiens
agacatggaggagaaggactacagtgaggccgatggcctttcggagaggaccacgcccttcaccctctgtgtcctggtccttctgagggccactgcagatgactctcctttgaaatgagaaaaagaaaagaaagcaagaacagaaaacgaagccacaggaagggaagtagacattgtatgcttatggtttctcattatgaaggtgcagcttgtaggaggtttgtacggatgtgctttgaagttatgtatattacatataacaggaaaaaatattaaaataaacagtgctggtaagtatgaagctgacattctaaaattataattatctgactgtgattgatgtatcctgaggttcctagatctcactgaactggcccagctaaggagacctggactctgggtgtgggttggctcacagtaggggctgacgggttcagtgtagtaatactgtgtgtggtgtttgtaattggttgattggtggggaggggtggggggccctaatggagaggtgtgggtttggcaagaaagaagcaacacagatgtcgtccccaaaatgccagttcaagacaccttctccctgcccccctggtagtaacagtcagggcctggtctgtgctcaggtactgggtcccagtctgggactctgctgctgaagttgccacagtagaggtccctggcttagtccttatctccctacggggcttgccttggttttcagtcttctctctctttctctcttttttttttttttgccacattctgcccttccctgaccccattgtaataaccaactccatatccaaagggaggtggtgctctcagccattgtagaagatggtggctttaacctgactgtctaaaaattcccagctaagccttttcctctactctcttccttgttctgaatcatttcttcttctcaggccaaagtagccatggtaaggaggcttcatggggcagaccctgaaagatcaaaactgcatttgcaaagccctcccctgtcccaggacaaagctgagactgacgggtgatgttgctcataggctccagctctgcataagaccttggcttggagacctccctctcagtcaacagctgaactctgagcttgtgcccagaaattaccccaagaccacaggaacccttcaagaagctcccatcacaagcttggcattgctctctgccacacgtgggcttcctcaggcttgtctgccacaagctacttctctgagctcagaaagtgccccttgatgagggaaaatgtcccactgcactgcgaatttctcagttccattttacctcccagtcctccttctaaaccagttaataaattcattccacaagtatttactgattacctgcttgtgccagggactattctcaggctgaagaaggtgggaggggagggcggaacctgaggagccacctgagccagctttatatttcaaccatggctggcccatctgagagcatctccccactctcgccaacctatcggggcatagcccagggatgcccccaggcggcccaggttagatgcgtccctttggcttgtcagtgatgacatacaccttagctgcttagctggtgctggcctgaggcagggcaggaaatcagaatagcatttgcttctctgggcaaatgggaagttcagcggggcagcagaatcagtggcattccccctggtgcaggccggtgggtccactccaactccccctgagtgtagcagcacactttccatacaccaggttctttctacaatcctggtggaaaagccacagaaccttcttcctgcccttcttgagagttccccctctttctgggtcaagagctggagtggtggctccatcctctctgggccacttcggtctaggaactcatctttgcaggaaccaggagtcctgagcacactgaacacacctcagagggaggatccttgttgtggattttgcacctggctttggggcaggggtgaagtgaccaggcttagcttgtggagtttatgggccaccagggtttggggaaatcaccatcccgcggatgctgtgacctcccttctacggagatgcaggcagtgccacgagggaggaggggacctgcaaagctagaatctagggcactgtttcctccccatccttctctttgtagagaatagagacgtttgtcttgtctgtcttcaacctacttttccttttctcttttttgtttctcatcctctctgtgccacctctccacccaggaggccatgtagcatagtggaaaaagtccctgagggcggttaggagttctgggtgaccatcctggctcagctcctaactcaccatgtgacatcaggctatccccattccccctcttgggcctcagtttcccgacttgcaaaataagcagaaagaaccagatgctctccagggtctttttctactttgctatctcatgggtcttcattttctcttattttgttttctctggatcttttccatctgagggtacaggaagtaccaggacctgtttcagtttttgaatcctgcaagcacattccaagactggcctgaaactgcatgagcaacatcactcgaaataattttttttttcaaaagcaccttaacaaccaattgcgatgctgtcctgttcctttttactcacacccttctctcctttctcgtccccatgctcccccacctcagtgctccgtgctgtatgcgtgtgctctctgttcttgtatactcaatataagtgaaataaatgtgtttgatgctgaaccata

SEQ ID NO: 10096 - protein, 37 aa, Homo sapiens
MEEKDYSEADGLSERTTPFTLCVLVLLRATADDSPLK

SEQ ID NO: 10097 - DNA, 5285 bp, Homo sapiens
gagggcgcgcggaggacccgccgccgccggtgtgaggcggcccgtcctggctcccttgtccgggaagcccgcccaggagccgccgccgggtcccgctcgtctgccgcctcagcctcagccccaacctcagccgccgccgttgcgcttgctcccgggcggtcctggcctgtgccgccgccgcccccagcgtcggagccatggcgggcgccgcgtccccttgcgccaacggctgcgggcccggcgcgccctcggacgccgaggtgctgcacctctgccgcagcctcgaggtgggcaccgtcatgactttgttctactccaagaagtcgcagcgacccgagcggaagaccttccaggtcaagctggagacgcgccagatcacgtggagccggggcgccgacaagatcgagggggccattgacattcgtgaaattaaggagatccgcccagggaagacctcacgggactttgatcgctatcaagaggacccagctttccggccggaccagtcacattgctttgtcattctctatggaatggaatttcgcctgaaaacgctgagcctgcaagccacatctgaggatgaagtgaacatgtggatcaagggcttaacttggctgatggaggatacattgcaggcacccacacccctgcagattgagaggtggctccggaagcagttttactcagtggatcggaatcgtgaggatcgtatatcagccaaggacctgaagaacatgctgtcccaggtcaactaccgggtccccaacatgcgcttcctccgagagcggctgacggacctggagcagcgcagcggggacatcacctacgggcagtttgctcagctgtaccgcagcctcatgtacagcgcccagaagacgatggacctccccttcttggaagccagtactctgagggctggggagcggccggagctttgccgagtgtcccttcctgagttccagcagttccttcttgactaccagggggagctgtgggctgttgatcgcctccaggtgcaggagttcatgctcagcttcctccgagaccccttacgagagatcgaggagccatacttcttcctggatgagtttgtcaccttcctgttctccaaagagaacagtgtgtggaactcgcagctggatgcagtatgcccggacaccatgaacaaccctctttcccactactggatctcctcctcgcacaacacgtacctgaccggggaccagttctccagtgagtcctccttggaagcctatgctcgctgcctgcggatgggctgtcgctgcattgagttggactgctgggacggcccggatgggatgccagttatttaccatgggcacacccttaccaccaagatcaagttctcagatgtcctgcacaccatcaaggagcatgcctttgtggcctcagagtacccagtcatcctgtccattgaggaccactgcagcattgcccagcagagaaacatggcccaatacttcaagaaggtgctgggggacacactcctcaccaagcccgtggagatctctgccgacgggctcccctcacccaaccagcttaagaggaagatcctcatcaagcacaagaagctggctgagggcagtgcctacgaggaggtgcctacatccatgatgtactctgagaacgacatcagcaactctatcaagaatggcatcctctacctggaggaccctgtgaaccacgaatggtatccccactactttgttctgaccagcagcaagatctactactctgaggagaccagcagtgaccagggcaacgaggatgaggaggagcccaaggaggtcagcagcagcacagagctgcactccaatgagaagtggttccatgggaagctaggggcagggcgtgacgggcgtcacatcgctgagcgcctgcttactgagtactgcatcgagaccggagcccctgacggctccttcctcgtgcgagagagtgagaccttcgtgggcgactacacgctctctttctggcggaacgggaaagtccagcactgccgtatccactcccggcaagatgctgggacccccaagttcttcttgacagacaacctcgtctttgactccctctatgacctcatcacgcactaccagcaggtgcccctgcgctgtaatgagtttgagatgcgactttcagagcctgtcccacagaccaacgcccacgagagcaaagagtggtaccacgcgagcctgaccagagcacaggctgagcacatgctaatgcgcgtccctcgtgatggggccttcctggtgcggaagcggaatgaacccaactcatatgccatctctttccgggctgagggcaagatcaagcattgccgtgtccagcaagagggccagacagtgatgctagggaactcggagttcgacagccttgttgacctcatcagctactatgagaaacacccgctataccgcaagatgaagctgcgctatcccatcaacgaggaggcactggagaagattggcacagctgagcctgactacggggccctgtatgagggacgcaaccctggcttctatgtagaggcaaaccctatgccaactttcaagtgtgcagtcaaagccctctttgactacaaggcccagagggaggacgagctgaccttcatcaagagcgccatcatccagaatgtggagaagcaagagggaggctggtggcgaggggactacggagggaagaagcagctgtggttcccatcaaactacgtggaagagatggtcaaccccgtggccctggagccggagagggagcacttggacgagaacagccccctaggggacttgctgcggggggtcttggatgtgccggcttgtcagattgccatccgtcctgagggcaagaacaaccggctcttcgtcttctccatcagcatggcgtcggtggcccactggtccctggatgttgctgccgactcacaggaggagctgcaggactgggtgaaaaagatccgtgaagtggcccagacagcagacgccaggctcactgaagggaagataatggaacggaggaagaagattgccctggagctctctgaacttgtcgtctactgccggcctgttccctttgatgaagagaagattggcacagaacgtgcttgctaccgggacatgtcatccttcccggaaaccaaggctgagaaatacgtgaacaaggccaaaggcaagaagttccttcagtacaatcgactgcagctctcccgcatctaccccaagggccagcgactggattcctccaactacgatcctttgcccatgtggatctgtggcagtcagcttgtggccctcaacttccagacccctgacaagcctatgcagatgaaccaggccctcttcatgacgggcaggcactgtggctacgtgctgcagccaagcaccatgcgggatgaggccttcgacccctttgacaagagcagcctccgcgggctggagccatgtgccatctctattgaggtgctgggggcccgacatctgccaaagaatggccgaggcattgtgtgtccttttgtggagattgaggtggctggagctgagtatgacagcaccaagcagaagacagagtttgtggtggacaatggactcaaccctgtatggccagccaagcccttccacttccagatcagtaaccctgaatttgcctttctgcgcttcgtggtgtatgaggaagacatgtttagtgaccagaatttcctggctcaggctactttcccagtaaaaggcctgaagacaggatacagagcagtgcctttgaagaacaactacagtgaggacctggagttggcctccctgctgatcaagattgacattttccctgccaagcaggagaatggtgacctcagtcccttcagtggtacgtccctgcgggagcggggctcagatgcctcaggccagctgtttcatggccgagcccgggaaggctcctttgaatcccgctaccagcagccgtttgaggacttccgcatctcccaggagcatctcgcagaccattttgacagtcgagaacgaagggccccaagaaggactcgggtcaatggagacaaccgcctctagttgtaccccagcctcgttggagagcagcaggtgctgtgcgccttgtagaatgccgcgaactgggttctttggaagcagccccctgtggcggccttccgggtctcgcagcctgaagcctggattccagcagtgaatgctagacagaaaccaagccattaatgagatgttattactgttttgggcctccatgccccagctctggatgaaggcaaaaactgtactgtgtttcgcattaagcacacacatctggccctgacttctggagatggatccttccatcttgtggggccaggaccatggccgaagccccttggagagagaggctgcctcagccagtggcacaggagactccaaggagctactgacattcctaagagtggaggaggaggaggagccttgctgggccagggaaacaaagtttacattgtcctgtagctttaaaaccacagctgggcagggtgagaagctagatgcccctgcagtttggccctggagccagggcagaggaatgtagggcctgcatggagaagggttctgccctgcctgaggaggaggacacagcacaagggcacattgcccatggctgggaacatgacccagcctgaaagatacaggggatcatgttaaaaatagcagtattatttttcgtctcaatggtattgtaactaagttatttactcctcctgctcctcacccctgtagggaaaccttggagaggagagtggcaggtgggctgcctgctgtgttaagaggacttagtttgtgatgtaaggcactgtcaggaatggggggcgggccagggtgggaagagaagaaatagcagagcctattttggtgaggttttttgtttttaagtcaaagaagactcagtatgctttccctgaggaatgaaaaagggattgaggagttgcctgactcctgggtgggtggggtacaggcagttaggtgctgaatgaagctgccatccttgctgcagcttctaactggtaaaaagatccagggatggagatgggaaggttagaaaggcagccctcacctctgaggacagaggccggggtccaggcccgtgggcgcaaaggtgcctcatagcatagccagcattcagcacacacaaacctactgcccacatttgggctcagggttggccatttgctagttctgctgccctcttaagatctgactgccaaataaatcatcctcatgtcctttttc

SEQ ID NO: 10098 - protein, 1291 aa, Homo sapiens; identical to SEQ ID NO: 1265

SEQ ID NO: 10099 - DNA, 5842 bp, Homo sapiens
gagggcgcgcggaggacccgccgccgccggtgtgaggcggcccgtcctggctcccttgtccgggaagcccgcccaggagccgccgccgggtcccgctcgtctgccgcctcagcctcagccccaacctcagccgccgccgttgcgcttgctcccgggcggtcctggcctgtgccgccgccgcccccagcgtcggagccatggcgggcgccgcgtccccttgcgccaacggctgcgggcccggcgcgccctcggacgccgaggtgctgcacctctgccgcagcctcgaggtgggcaccgtcatgactttgttctactccaagaagtcgcagcgacccgagcggaagaccttccaggtcaagctggagacgcgccagatcacgtggagccggggcgccgacaagatcgagggggccattgacattcgtgaaattaaggagatccgcccagggaagacctcacgggactttgatcgctatcaagaggacccagctttccggccggaccagtcacattgctttgtcattctctatggaatggaatttcgcctgaaaacgctgagcctgcaagccacatctgaggatgaagtgaacatgtggatcaagggcttaacttggctgatggaggatacattgcaggcacccacacccctgcagattgagaggtggctccggaagcagttttactcagtggatcggaatcgtgaggatcgtatatcagccaaggacctgaagaacatgctgtcccaggtcaactaccgggtccccaacatgcgcttcctccgagagcggctgacggacctggagcagcgcagcggggacatcacctacgggcagtttgctcagctgtaccgcagcctcatgtacagcgcccagaagacgatggacctccccttcttggaagccagtactctgagggctggggagcggccggagctttgccgagtgtcccttcctgagttccagcagttccttcttgactaccagggggagctgtgggctgttgatcgcctccaggtgcaggagttcatgctcagcttcctccgagaccccttacgagagatcgaggagccatacttcttcctggatgagtttgtcaccttcctgttctccaaagagaacagtgtgtggaactcgcagctggatgcagtatgcccggacaccatgaacaaccctctttcccactactggatctcctcctcgcacaacacgtacctgaccggggaccagttctccagtgagtcctccttggaagcctatgctcgctgcctgcggatgggctgtcgctgcattgagttggactgctgggacggcccggatgggatgccagttatttaccatgggcacacccttaccaccaagatcaagttctcagatgtcctgcacaccatcaaggagcatgcctttgtggcctcagagtacccagtcatcctgtccattgaggaccactgcagcattgcccagcagagaaacatggcccaatacttcaagaaggtgctgggggacacactcctcaccaagcccgtggagatctctgccgacgggctcccctcacccaaccagcttaagaggaagatcctcatcaagcacaagaagctggctgagggcagtgcctacgaggaggtgcctacatccatgatgtactctgagaacgacatcagcaactctatcaagaatggcatcctctacctggaggaccctgtgaaccacgaatggtatccccactactttgttctgaccagcagcaagatctactactctgaggagaccagcagtgaccagggcaacgaggatgaggaggagcccaaggaggtcagcagcagcacagagctgcactccaatgagaagtggttccatgggaagctaggggcagggcgtgacgggcgtcacatcgctgagcgcctgcttactgagtactgcatcgagaccggagcccctgacggctccttcctcgtgcgagagagtgagaccttcgtgggcgactacacgctctctttctggcggaacgggaaagtccagcactgccgtatccactcccggcaagatgctgggacccccaagttcttcttgacagacaacctcgtctttgactccctctatgacctcatcacgcactaccagcaggtgcccctgcgctgtaatgagtttgagatgcgactttcagagcctgtcccacagaccaacgcccacgagagcaaagagtggtaccacgcgagcctgaccagagcacaggctgagcacatgctaatgcgcgtccctcgtgatggggccttcctggtgcggaagcggaatgaacccaactcatatgccatctctttccgggctgagggcaagatcaagcattgccgtgtccagcaagagggccagacagtgatgctagggaactcggagttcgacagccttgttgacctcatcagctactatgagaaacacccgctataccgcaagatgaagctgcgctatcccatcaacgaggaggcactggagaagattggcacagctgagcctgactacggggccctgtatgagggacgcaaccctggcttctatgtagaggcaaaccctatgccaactttcaagtgtgcagtcaaagccctctttgactacaaggcccagagggaggacgagctgaccttcatcaagagcgccatcatccagaatgtggagaagcaagagggaggctggtggcgaggggactacggagggaagaagcagctgtggttcccatcaaactacgtggaagagatggtcaaccccgtggccctggagccggagagggagcacttggacgagaacagccccctaggggacttgctgcggggggtcttggatgtgccggcttgtcagattgccatccgtcctgagggcaagaacaaccggctcttcgtcttctccatcagcatggcgtcggtggcccactggtccctggatgttgctgccgactcacaggaggagctgcaggactgggtgaaaaagatccgtgaagtggcccagacagcagacgccaggctcactgaagggaagataatggaacggaggaagaagattgccctggagctctctgaacttgtcgtctactgccggcctgttccctttgatgaagagaagattggcacagaacgtgcttgctaccgggacatgtcatccttcccggaaaccaaggctgagaaatacgtgaacaaggccaaaggcaagaagttccttcagtacaatcgactgcagctctcccgcatctaccccaagggccagcgactggattcctccaactacgatcctttgcccatgtggatctgtggcagtcagcttgtggccctcaacttccagacccctgacaagcctatgcagatgaaccaggccctcttcatgacgggcaggcactgtggctacgtgctgcagccaagcaccatgcgggatgaggccttcgacccctttgacaagagcagcctccgcgggctggagccatgtgccatctctattgaggtgctgggggcccgacatctgccaaagaatggccgaggcattgtgtgtccttttgtggagattgaggtggctggagctgagtatgacagcaccaagcagaagacagagtttgtggtggacaatggactcaaccctgtatggccagccaagcccttccacttccagatcagtaaccctgaatttgcctttctgcgcttcgtggtgtatgaggaagacatgtttagtgaccagaatttcctggctcaggctactttcccagtaaaaggcctgaagacaggatacagagcagtgcctttgaagaacaactacagtgaggacctggagttggcctccctgctgatcaagattgacattttccctgccaagcaggagaatggtgacctcagtcccttcagtggtacgtccctgcgggagcggggctcagatgcctcaggccagctgtttcatggccgagcccgggaaggctcctttgaatcccgctaccagcagccgtttgaggacttccgcatctcccaggagcatctcgcagaccattttgacagtcgagaacgaagggccccaagaaggactcgggtcaatggagacaaccgcctctagttgtaccccagcctcgttggagagcagcaggtgctgtgcgccttgtagaatgccgcgaactgggttctttggaagcagccccctgtggcggccttccgggtctcgcagcctgaagcctggattccagcagtgaatgctagacagaaaccaagccattaatgagatgttattactgttttgggcctccatgccccagctctggatgaaggcaaaaactgtactgtgtttcgcattaagcacacacatctggccctgacttctggagatggatccttccatcttgtggggccaggaccatggccgaagccccttggagagagaggctgcctcagccagtggcacaggagactccaaggagctactgacattcctaagagtggaggaggaggaggagccttgctgggccagggaaacaaagtttacattgtcctgtagctttaaaaccacagctgggcagggtgagaagctagatgcccctgcagtttggccctggagccagggcagaggaatgtagggcctgcatggagaagggttctgccctgcctgaggaggaggacacagcacaagggcacattgcccatggctgggaacatgacccagcctgaaagatacaggggatcatgttaaaaatagcagtattatttttcgtctcaatggtattgtaactaagttatttactcctcctgctcctcacccctgtagggaaaccttggagaggagagtggcaggtgggctgcctgctgtgttaagaggacttagtttgtgatgtaaggcactgtcaggaatggggggcgggccagggtgggaagagaagaaatagcagagcctattttggtgaggttttttgtttttaagtcaaagaagactcagtatgctttccctgaggaatgaaaaagggattgaggagttgcctgactcctgggtgggtggggtacaggcagttaggtgctgaatgaagctgccatccttgctgcagcttctaactggtaaaaagatccagggatggagatgggaaggttagaaaggcagccctcacctctgaggacagaggccggggtccaggcccgtgggcgcaaaggtgcctcatagcatagccagcattcagcacacacaaacctactgcccacatttgggctcagggttggccatttgctagttctgctgccctcttaagatctgactgccaaataaatcatcctcatgtcctttttcctttgacttgtatgctctttcgggggctcaggaaagcctgttgcatgggacatgctcactagaaacagtcgccagatgattattctgcagtagaagcaggtaggaaatttctggaaatttctcaggttaagcagcaagagctgtaacccctcctctgggctaacaggagttgtgggtccactctctcctgcccaccctctgagggtgtgtctgagcagagtacatcctgcctgggttctttgtggccagccagttttggtggtgagctggaaacaaccagagcccctttccagttccacagaaacctctcctttcaaaaatgttgcattcagttcgttaacactgccaggtgccattctgattgcctctaggacttggcagctgaaatctctgggccctttcaacacagttgaaaggcccttctcttcctgaagctctgtttccatagttggctgtgctgggatggaacaaaaatgacgccacacaaaaaatttaagatagatccggttccgtggatgacatgaactgatgatagccagtatcaaacagcgatagtg

SEQ ID NO: 10100 - protein, 1291 aa, Homo sapiens; identical to SEQ ID NO: 1265

SEQ ID NO: 10101 - DNA, 5493 bp, Homo sapiens
gccgctcgtggccgccgggctgtgtccggggccgcgtgagaaagctctgcgggactgagggctgggtgggtcgaccgggaacggcgcgcgctcccgccgccatcgcgcctccgtccccgcctgcggcctgtctgggggtcgcggggcgcaggcgcggcgggccgacgggcgggggtcctccccacgggtgcgcgggcgcctttgttcccggcgccgaagcggggtggggcctcagggcagccccgccccgccgcgctgaggccccgccccgtgtccgcctgcaggagccgccgccgggtcccgctcgtctgccgcctcagcctcagccccaacctcagccgccgccgttgcgcttgctcccgggcggtcctggcctgtgccgccgccgcccccagcgtcggagccatggcgggcgccgcgtccccttgcgccaacggctgcgggcccggcgcgccctcggacgccgaggtgctgcacctctgccgcagcctcgaggtgggcaccgtcatgactttgttctactccaagaagtcgcagcgacccgagcggaagaccttccaggtcaagctggagacgcgccagatcacgtggagccggggcgccgacaagatcgagggggccattgacattcgtgaaattaaggagatccgcccagggaagacctcacgggactttgatcgctatcaagaggacccagctttccggccggaccagtcacattgctttgtcattctctatggaatggaatttcgcctgaaaacgctgagcctgcaagccacatctgaggatgaagtgaacatgtggatcaagggcttaacttggctgatggaggatacattgcaggcacccacacccctgcagattgagaggtggctccggaagcagttttactcagtggatcggaatcgtgaggatcgtatatcagccaaggacctgaagaacatgctgtcccaggtcaactaccgggtccccaacatgcgcttcctccgagagcggctgacggacctggagcagcgcagcggggacatcacctacgggcagtttgctcagctgtaccgcagcctcatgtacagcgcccagaagacgatggacctccccttcttggaagccagtactctgagggctggggagcggccggagctttgccgagtgtcccttcctgagttccagcagttccttcttgactaccagggggagctgtgggctgttgatcgcctccaggtgcaggagttcatgctcagcttcctccgagaccccttacgagagatcgaggagccatacttcttcctggatgagtttgtcaccttcctgttctccaaagagaacagtgtgtggaactcgcagctggatgcagtatgcccggacaccatgaacaaccctctttcccactactggatctcctcctcgcacaacacgtacctgaccggggaccagttctccagtgagtcctccttggaagcctatgctcgctgcctgcggatgggctgtcgctgcattgagttggactgctgggacggcccggatgggatgccagttatttaccatgggcacacccttaccaccaagatcaagttctcagatgtcctgcacaccatcaaggagcatgcctttgtggcctcagagtacccagtcatcctgtccattgaggaccactgcagcattgcccagcagagaaacatggcccaatacttcaagaaggtgctgggggacacactcctcaccaagcccgtggagatctctgccgacgggctcccctcacccaaccagcttaagaggaagatcctcatcaagcacaagaagctggctgagggcagtgcctacgaggaggtgcctacatccatgatgtactctgagaacgacatcagcaactctatcaagaatggcatcctctacctggaggaccctgtgaaccacgaatggtatccccactactttgttctgaccagcagcaagatctactactctgaggagaccagcagtgaccagggcaacgaggatgaggaggagcccaaggaggtcagcagcagcacagagctgcactccaatgagaagtggttccatgggaagctaggggcagggcgtgacgggcgtcacatcgctgagcgcctgcttactgagtactgcatcgagaccggagcccctgacggctccttcctcgtgcgagagagtgagaccttcgtgggcgactacacgctctctttctggcggaacgggaaagtccagcactgccgtatccactcccggcaagatgctgggacccccaagttcttcttgacagacaacctcgtctttgactccctctatgacctcatcacgcactaccagcaggtgcccctgcgctgtaatgagtttgagatgcgactttcagagcctgtcccacagaccaacgcccacgagagcaaagagtggtaccacgcgagcctgaccagagcacaggctgagcacatgctaatgcgcgtccctcgtgatggggccttcctggtgcggaagcggaatgaacccaactcatatgccatctctttccgggctgagggcaagatcaagcattgccgtgtccagcaagagggccagacagtgatgctagggaactcggagttcgacagccttgttgacctcatcagctactatgagaaacacccgctataccgcaagatgaagctgcgctatcccatcaacgaggaggcactggagaagattggcacagctgagcctgactacggggccctgtatgagggacgcaaccctggcttctatgtagaggcaaaccctatgccaactttcaagtgtgcagtcaaagccctctttgactacaaggcccagagggaggacgagctgaccttcatcaagagcgccatcatccagaatgtggagaagcaagagggaggctggtggcgaggggactacggagggaagaagcagctgtggttcccatcaaactacgtggaagagatggtcaaccccgtggccctggagccggagagggagcacttggacgagaacagccccctaggggacttgctgcggggggtcttggatgtgccggcttgtcagattgccatccgtcctgagggcaagaacaaccggctcttcgtcttctccatcagcatggcgtcggtggcccactggtccctggatgttgctgccgactcacaggaggagctgcaggactgggtgaaaaagatccgtgaagtggcccagacagcagacgccaggctcactgaagggaagataatggaacggaggaagaagattgccctggagctctctgaacttgtcgtctactgccggcctgttccctttgatgaagagaagattggcacagaacgtgcttgctaccgggacatgtcatccttcccggaaaccaaggctgagaaatacgtgaacaaggccaaaggcaagaagttccttcagtacaatcgactgcagctctcccgcatctaccccaagggccagcgactggattcctccaactacgatcctttgcccatgtggatctgtggcagtcagcttgtggccctcaacttccagacccctgacaagcctatgcagatgaaccaggccctcttcatgacgggcaggcactgtggctacgtgctgcagccaagcaccatgcgggatgaggccttcgacccctttgacaagagcagcctccgcgggctggagccatgtgccatctctattgaggtgctgggggcccgacatctgccaaagaatggccgaggcattgtgtgtccttttgtggagattgaggtggctggagctgagtatgacagcaccaagcagaagacagagtttgtggtggacaatggactcaaccctgtatggccagccaagcccttccacttccagatcagtaaccctgaatttgcctttctgcgcttcgtggtgtatgaggaagacatgtttagtgaccagaatttcctggctcaggctactttcccagtaaaaggcctgaagacaggatacagagcagtgcctttgaagaacaactacagtgaggacctggagttggcctccctgctgatcaagattgacattttccctgccaagcaggagaatggtgacctcagtcccttcagtggtacgtccctgcgggagcggggctcagatgcctcaggccagctgtttcatggccgagcccgggaaggctcctttgaatcccgctaccagcagccgtttgaggacttccgcatctcccaggagcatctcgcagaccattttgacagtcgagaacgaagggccccaagaaggactcgggtcaatggagacaaccgcctctagttgtaccccagcctcgttggagagcagcaggtgctgtgcgccttgtagaatgccgcgaactgggttctttggaagcagccccctgtggcggccttccgggtctcgcagcctgaagcctggattccagcagtgaatgctagacagaaaccaagccattaatgagatgttattactgttttgggcctccatgccccagctctggatgaaggcaaaaactgtactgtgtttcgcattaagcacacacatctggccctgacttctggagatggatccttccatcttgtggggccaggaccatggccgaagccccttggagagagaggctgcctcagccagtggcacaggagactccaaggagctactgacattcctaagagtggaggaggaggaggagccttgctgggccagggaaacaaagtttacattgtcctgtagctttaaaaccacagctgggcagggtgagaagctagatgcccctgcagtttggccctggagccagggcagaggaatgtagggcctgcatggagaagggttctgccctgcctgaggaggaggacacagcacaagggcacattgcccatggctgggaacatgacccagcctgaaagatacaggggatcatgttaaaaatagcagtattatttttcgtctcaatggtattgtaactaagttatttactcctcctgctcctcacccctgtagggaaaccttggagaggagagtggcaggtgggctgcctgctgtgttaagaggacttagtttgtgatgtaaggcactgtcaggaatggggggcgggccagggtgggaagagaagaaatagcagagcctattttggtgaggttttttgtttttaagtcaaagaagactcagtatgctttccctgaggaatgaaaaagggattgaggagttgcctgactcctgggtgggtggggtacaggcagttaggtgctgaatgaagctgccatccttgctgcagcttctaactggtaaaaagatccagggatggagatgggaaggttagaaaggcagccctcacctctgaggacagaggccggggtccaggcccgtgggcgcaaaggtgcctcatagcatagccagcattcagcacacacaaacctactgcccacatttgggctcagggttggccatttgctagttctgctgccctcttaagatctgactgccaaataaatcatcctcatgtcctttttc

SEQ ID NO: 10102 - protein, 1291 aa, Homo sapiens; identical to SEQ ID NO: 1265

SEQ ID NO: 10103 - DNA, 6050 bp, Homo sapiens
gccgctcgtggccgccgggctgtgtccggggccgcgtgagaaagctctgcgggactgagggctgggtgggtcgaccgggaacggcgcgcgctcccgccgccatcgcgcctccgtccccgcctgcggcctgtctgggggtcgcggggcgcaggcgcggcgggccgacgggcgggggtcctccccacgggtgcgcgggcgcctttgttcccggcgccgaagcggggtggggcctcagggcagccccgccccgccgcgctgaggccccgccccgtgtccgcctgcaggagccgccgccgggtcccgctcgtctgccgcctcagcctcagccccaacctcagccgccgccgttgcgcttgctcccgggcggtcctggcctgtgccgccgccgcccccagcgtcggagccatggcgggcgccgcgtccccttgcgccaacggctgcgggcccggcgcgccctcggacgccgaggtgctgcacctctgccgcagcctcgaggtgggcaccgtcatgactttgttctactccaagaagtcgcagcgacccgagcggaagaccttccaggtcaagctggagacgcgccagatcacgtggagccggggcgccgacaagatcgagggggccattgacattcgtgaaattaaggagatccgcccagggaagacctcacgggactttgatcgctatcaagaggacccagctttccggccggaccagtcacattgctttgtcattctctatggaatggaatttcgcctgaaaacgctgagcctgcaagccacatctgaggatgaagtgaacatgtggatcaagggcttaacttggctgatggaggatacattgcaggcacccacacccctgcagattgagaggtggctccggaagcagttttactcagtggatcggaatcgtgaggatcgtatatcagccaaggacctgaagaacatgctgtcccaggtcaactaccgggtccccaacatgcgcttcctccgagagcggctgacggacctggagcagcgcagcggggacatcacctacgggcagtttgctcagctgtaccgcagcctcatgtacagcgcccagaagacgatggacctccccttcttggaagccagtactctgagggctggggagcggccggagctttgccgagtgtcccttcctgagttccagcagttccttcttgactaccagggggagctgtgggctgttgatcgcctccaggtgcaggagttcatgctcagcttcctccgagaccccttacgagagatcgaggagccatacttcttcctggatgagtttgtcaccttcctgttctccaaagagaacagtgtgtggaactcgcagctggatgcagtatgcccggacaccatgaacaaccctctttcccactactggatctcctcctcgcacaacacgtacctgaccggggaccagttctccagtgagtcctccttggaagcctatgctcgctgcctgcggatgggctgtcgctgcattgagttggactgctgggacggcccggatgggatgccagttatttaccatgggcacacccttaccaccaagatcaagttctcagatgtcctgcacaccatcaaggagcatgcctttgtggcctcagagtacccagtcatcctgtccattgaggaccactgcagcattgcccagcagagaaacatggcccaatacttcaagaaggtgctgggggacacactcctcaccaagcccgtggagatctctgccgacgggctcccctcacccaaccagcttaagaggaagatcctcatcaagcacaagaagctggctgagggcagtgcctacgaggaggtgcctacatccatgatgtactctgagaacgacatcagcaactctatcaagaatggcatcctctacctggaggaccctgtgaaccacgaatggtatccccactactttgttctgaccagcagcaagatctactactctgaggagaccagcagtgaccagggcaacgaggatgaggaggagcccaaggaggtcagcagcagcacagagctgcactccaatgagaagtggttccatgggaagctaggggcagggcgtgacgggcgtcacatcgctgagcgcctgcttactgagtactgcatcgagaccggagcccctgacggctccttcctcgtgcgagagagtgagaccttcgtgggcgactacacgctctctttctggcggaacgggaaagtccagcactgccgtatccactcccggcaagatgctgggacccccaagttcttcttgacagacaacctcgtctttgactccctctatgacctcatcacgcactaccagcaggtgcccctgcgctgtaatgagtttgagatgcgactttcagagcctgtcccacagaccaacgcccacgagagcaaagagtggtaccacgcgagcctgaccagagcacaggctgagcacatgctaatgcgcgtccctcgtgatggggccttcctggtgcggaagcggaatgaacccaactcatatgccatctctttccgggctgagggcaagatcaagcattgccgtgtccagcaagagggccagacagtgatgctagggaactcggagttcgacagccttgttgacctcatcagctactatgagaaacacccgctataccgcaagatgaagctgcgctatcccatcaacgaggaggcactggagaagattggcacagctgagcctgactacggggccctgtatgagggacgcaaccctggcttctatgtagaggcaaaccctatgccaactttcaagtgtgcagtcaaagccctctttgactacaaggcccagagggaggacgagctgaccttcatcaagagcgccatcatccagaatgtggagaagcaagagggaggctggtggcgaggggactacggagggaagaagcagctgtggttcccatcaaactacgtggaagagatggtcaaccccgtggccctggagccggagagggagcacttggacgagaacagccccctaggggacttgctgcggggggtcttggatgtgccggcttgtcagattgccatccgtcctgagggcaagaacaaccggctcttcgtcttctccatcagcatggcgtcggtggcccactggtccctggatgttgctgccgactcacaggaggagctgcaggactgggtgaaaaagatccgtgaagtggcccagacagcagacgccaggctcactgaagggaagataatggaacggaggaagaagattgccctggagctctctgaacttgtcgtctactgccggcctgttccctttgatgaagagaagattggcacagaacgtgcttgctaccgggacatgtcatccttcccggaaaccaaggctgagaaatacgtgaacaaggccaaaggcaagaagttccttcagtacaatcgactgcagctctcccgcatctaccccaagggccagcgactggattcctccaactacgatcctttgcccatgtggatctgtggcagtcagcttgtggccctcaacttccagacccctgacaagcctatgcagatgaaccaggccctcttcatgacgggcaggcactgtggctacgtgctgcagccaagcaccatgcgggatgaggccttcgacccctttgacaagagcagcctccgcgggctggagccatgtgccatctctattgaggtgctgggggcccgacatctgccaaagaatggccgaggcattgtgtgtccttttgtggagattgaggtggctggagctgagtatgacagcaccaagcagaagacagagtttgtggtggacaatggactcaaccctgtatggccagccaagcccttccacttccagatcagtaaccctgaatttgcctttctgcgcttcgtggtgtatgaggaagacatgtttagtgaccagaatttcctggctcaggctactttcccagtaaaaggcctgaagacaggatacagagcagtgcctttgaagaacaactacagtgaggacctggagttggcctccctgctgatcaagattgacattttccctgccaagcaggagaatggtgacctcagtcccttcagtggtacgtccctgcgggagcggggctcagatgcctcaggccagctgtttcatggccgagcccgggaaggctcctttgaatcccgctaccagcagccgtttgaggacttccgcatctcccaggagcatctcgcagaccattttgacagtcgagaacgaagggccccaagaaggactcgggtcaatggagacaaccgcctctagttgtaccccagcctcgttggagagcagcaggtgctgtgcgccttgtagaatgccgcgaactgggttctttggaagcagccccctgtggcggccttccgggtctcgcagcctgaagcctggattccagcagtgaatgctagacagaaaccaagccattaatgagatgttattactgttttgggcctccatgccccagctctggatgaaggcaaaaactgtactgtgtttcgcattaagcacacacatctggccctgacttctggagatggatccttccatcttgtggggccaggaccatggccgaagccccttggagagagaggctgcctcagccagtggcacaggagactccaaggagctactgacattcctaagagtggaggaggaggaggagccttgctgggccagggaaacaaagtttacattgtcctgtagctttaaaaccacagctgggcagggtgagaagctagatgcccctgcagtttggccctggagccagggcagaggaatgtagggcctgcatggagaagggttctgccctgcctgaggaggaggacacagcacaagggcacattgcccatggctgggaacatgacccagcctgaaagatacaggggatcatgttaaaaatagcagtattatttttcgtctcaatggtattgtaactaagttatttactcctcctgctcctcacccctgtagggaaaccttggagaggagagtggcaggtgggctgcctgctgtgttaagaggacttagtttgtgatgtaaggcactgtcaggaatggggggcgggccagggtgggaagagaagaaatagcagagcctattttggtgaggttttttgtttttaagtcaaagaagactcagtatgctttccctgaggaatgaaaaagggattgaggagttgcctgactcctgggtgggtggggtacaggcagttaggtgctgaatgaagctgccatccttgctgcagcttctaactggtaaaaagatccagggatggagatgggaaggttagaaaggcagccctcacctctgaggacagaggccggggtccaggcccgtgggcgcaaaggtgcctcatagcatagccagcattcagcacacacaaacctactgcccacatttgggctcagggttggccatttgctagttctgctgccctcttaagatctgactgccaaataaatcatcctcatgtcctttttcctttgacttgtatgctctttcgggggctcaggaaagcctgttgcatgggacatgctcactagaaacagtcgccagatgattattctgcagtagaagcaggtaggaaatttctggaaatttctcaggttaagcagcaagagctgtaacccctcctctgggctaacaggagttgtgggtccactctctcctgcccaccctctgagggtgtgtctgagcagagtacatcctgcctgggttctttgtggccagccagttttggtggtgagctggaaacaaccagagcccctttccagttccacagaaacctctcctttcaaaaatgttgcattcagttcgttaacactgccaggtgccattctgattgcctctaggacttggcagctgaaatctctgggccctttcaacacagttgaaaggcccttctcttcctgaagctctgtttccatagttggctgtgctgggatggaacaaaaatgacgccacacaaaaaatttaagatagatccggttccgtggatgacatgaactgatgatagccagtatcaaacagcgatagtg

SEQ ID NO: 10104 - protein, 1291 aa, Homo sapiens; identical to SEQ ID NO: 1265

SEQ ID NO: 10105 - DNA, 1052 bp, Homo sapiens
tagttgtaccccagcctcgttggagagcagcaggtgctgtgcgccttgtagaatgccgcgaactgggttctttggaagcagccccctgtggcggccttccgggtctcgcagcctgaagcctggattccagcagtgaatgctagacagaaaccaagccattaatgagatgttattactgttttgggcctccatgccccagctctggatgaaggcaaaaactgtactgtgtttcgcattaagcacacacatctggccctgacttctggagatggatccttccatcttgtggggccaggaccatggccgaagcagccctcacctctgaggacagaggccggggtccaggcccgtgggcgcaaaggtgcctcatagcatagccagcattcagcacacacaaacctactgcccacatttgggctcagggttggccatttgctagttctgctgccctcttaagatctgactgccaaataaatcatcctcatgtcctttttcctttgacttgtatgctctttcgggggctcaggaaagcctgttgcatgggacatgctcactagaaacagtcgccagatgattattctgcagtagaagcaggtaggaaatttctggaaatttctcaggttaagcagcaagagctgtaacccctcctctgggctaacaggagttgtgggtccactctctcctgcccaccctctgagggtgtgtctgagcagagtacatcctgcctgggttctttgtggccagccagttttggtggtgagctggaaacaaccagagcccctttccagttccacagaaacctctcctttcaaaaatgttgcattcagttcgttaacactgccaggtgccattctgattgcctctaggacttggcagctgaaatctctgggccctttcaacacagttgaaaggcccttctcttcctgaagctctgtttccatagttggctgtgctgggatggaacaaaaatgacgccacacaaaaaatttaagatagatccggttccgtggatgacatgaactgatgatagccagtatcaaacagcgatagtg

SEQ ID NO: 10106 - protein, 40 aa, Homo sapiens
MLDRNQAINEMLLLFWASMPQLWMKAKTVLCFALSTHIWP

SEQ ID NO: 10107 - DNA, 9763 bp, Homo sapiens
attgaatagggaaaacctgctttctgcaaacaactgaaaaagctgcatttagaaactgtttctttggccctcatcgagaagctggaacttgtattgttaggccccttatgggacaagctctcaactgctgatcacccagtgattgtcaccatggccagcaagaggaaatccaccacaccatgcatgatcccagtgaagactgtggtgttgcaagatgccagcatggaggcccagcccgctgagaccttgcctgaaggaccccagcaggatctgcccccagaagcatctgctgccagcagtgaggcagcacagaaccccagcagtactgatggctctacactggccaatgggcatcggagcactttagatggctatttatattcctgtaaatactgcgatttcagatcccatgacatgacccaatttgtgggacatatgaactcagagcacacagactttaataaagacccaacctttgtatgcagtgggtgcagttttctggcaaaaacccctgaggggctttccttgcacaatgccacatgtcactccggggaagccagctttgtgtggaacgtggccaagccagacaatcatgtggttgtggagcagagcatccctgagagcaccagcactcctgacctagcgggtgagcccagtgctgaaggggctgatggacaggcagaaatcatcattaccaaaactccaatcatgaagataatgaaaggcaaagctgaagccaaaaaaattcatacactcaaggagaatgtccctagccagcctgtgggtgaggccttaccaaagctgtcgactggagaaatggaggtgagagagggggaccattccttcatcaatggggcagttccagtcagccaggcatctgccagctctgcaaaaaacccccatgccgccaacgggcccctgataggaacagtgccagttttgccagctggcatagcacagttcctctccctccagcagcagcccccagtgcatgcccaacaccatgtccaccagccactgcccacggccaaggcccttcccaaagtgatgatccccctgagcagcattccaacgtacaatgcagccatggactctaacagcttcctgaagaactccttccacaagttcccctaccccaccaaagccgagctctgctatttgactgtggtgaccaagtatccagaagaacagctcaagatctggttcacagcccaaaggctgaagcaggggatcagctggtcccctgaggagattgaggatgcccggaaaaagatgttcaatacagtcatccagtctgtgcctcagcccacaattacggttctaaataccccactcgtcgccagtgctggcaatgtccagcatctcatccaggccgctcttccaggtcacgttgtggggcagccagagggtacaggagggggacttctggtcactcagccattgatggccaatgggttgcaagcaacaagttcccctctccccctcacggtgacatccgtccccaagcagccaggtgtggcacccattaacactgtgtgttcaaatacaacgtcagctgtgaaggtggtcaatgcggcccagtcgctcctcacggcctgccccagcataacctcccaagccttccttgatgctagcatctacaaaaataagaaatctcatgaacagctgtcagctctgaaagggagcttctgtcggaaccagttcccagggcagagcgaagttgaacatctcacaaaagtgacgggcctcagtaccagagaggtgcggaaatggttcagtgatcgtagataccactgccggaacttgaagggctccagagcgatgatacctggagatcacagttccatcatcattgactctgtgccagaggtgtccttctccccatcgtccaaggtccctgaggtaacctgcattccgacaacagccacactagcaacccacccttctgccaaacgacaatcttggcaccagactcctgacttcacaccaaccaaatacaaggagagagcccctgagcagctcagagccctggagagcagttttgcacaaaaccctcttcctcttgatgaggaactggaccgcctgagaagtgaaaccaaaatgacccgacgagaaattgatagctggttttcagagagacggaaaaaagtgaatgctgaggagaccaagaaggctgaggagaatgcctctcaggaggaagaggaggctgctgaggatgagggtggagaagaggatttggccagtgagctaagggtctctggtgaaaatggctctctggaaatgcccagcagccatatcttggcagagcgcaaagtcagccccattaaaatcaacctgaagaacctgagggtcactgaagccaatggcaggaacgagattccagggctgggtgcctgtgaccctgaggatgatgagtcaaacaaactggcagagcagctcccaggcaaagtgagctgcaaaaagactgcccagcagcggcacttgctgcggcagctctttgtccagacacagtggccaagcaaccaggactatgactccatcatggcccagacgggtctgccacggccagaggtggtgcgctggtttggagatagcaggtacgcactgaagaacggccaactcaaatggtacgaagactataagcgaggcaacttcccaccagggctactggtcattgcccctggcaaccgggagctcctgcaggactattacatgacacacaagatgctgtatgaagaggacctgcagaacctctgtgacaagacccagatgagctcccagcaggtcaagcagtggtttgctgagaaaatgggggaggagaccagagccgtggcagacacaggcagtgaggaccagggccctggtactggtgagctcacagcagttcacaaagggatgggtgacacctattcagaggtgtctgagaacagtgagtcgtgggagccccgtgtccctgaggccagctcagagccctttgacacatcgagtccccaggctggacgtcagctcgaaacagactgaatttgatctgattaatgtgaaggactggccagtctgggaaaccgcctgccacgtggaagagccaaacccgactctctgctgccacatgccgttcccatgcccggctgctgggcacctgggagagcttccagaatcctcgcagacagcccagagcctgccgctaccctcggcctgcccaccaccaagcaagcagcaagcaagatggggttctcatcagttcttcctcccacaatgtaggacctttcctttaccttccaatggataaaatagttcagagttcatagtcatattcatagacacagaatcaagcttttaacatatacatccacctctatatgttaaataaaacatcagattatcaacactgtcattacgtagaaactttggttagccaagcagtgcattgtcagttacgtcatctctaaaaatgacctgtgtctgttctctggggattgctgggtcacaggtgcccctcaccttccacagtcaggcagggaagttataggcacaaagctacgtctggaacccctttgtgccccctttgtgttcctcaaggaagcagtacctttgaagagatctctgctgcattaagtgatgaccggctacgtttcatgtcaggcttgctttgccttgtgggctactcagtgcagaacctgctgtaaccctcagttcaaaaaatggactggcaatgtgattagcgttggatgctttaccattctctttagttgttaccgtaattctgctttttcatgggagtttgaatcatggaccataacttttcagttatcagatcaactaaagaaacatttgttgttaagcctaatgtgctgacctatgtgcctgcattttttttttaatctagacatgtttggagtgagagaaagatggaaaaaagacatggggtagggacgtaagtggaaatctatagccacagcctgaagctttgaccactgcggttttcagagccctttctccacactcatttcagagcctcctatggtttgggaaggaataacacactggcccattagtaagggtgaaggctggagggatttgttgacttcttggaattatcagaggtagggtggtctttagcacaaagacttgcatgcagagatccctggcagaacacccagagtgcccgtggctcccaccccagggtctggccggtgtgctggatgcatgcccaagggtgctgggcatcactggtccttgtgaggatgcttttaaagttttatatttatgtccccaaacttggaaacaagaactctactttagcctaaccctcatgtccttttttgaattgagaaaattacaggaaatggtgcctttgaaaattagaaaacttgcttacagagctgttctaaatggtaaatcctcaatttccccaagaccggttgctctgagagtagctggtaaagaggggcgaactaaagacctgtccacctgtagctccgctcatttcttagaaaccacctgcttcccagagtgccaagccacaagtaccaggcttcgtgggcacagacacctcctgggctgggcagagtgacagtgctagaagaccccagagagagggcaagggctttgggcaagaagcactggtggtgttttagggaccgtccttctcccctacccagggaactggacctggcagggcaccgtgctcatgtggctccaaggacaagcatggcggtggccccttctgccttccaggagaggtcttgcttttgaaaccaaaatcatgttcttctaaagtgtcatcttctgccctccctgtcccaatagggaccacatcttatttgtctcaaacagggacttgtgagtacttggcaagttttgcagcctatttttgtattcttaatttggggagtaaagatgtttggtctcaaaaacctttgaggaattgccaagaatggcgagtgattgctttccttcagagaacagacacttggaatttctccttttagtgtttatatacgtgcagattaatttatatatatatatatacacacacacatatacagtataaatactcatttgattctcgtaaaacgcgcatctggcgtgtgcagttgagaaacttggtggcacatgggtgttgggggagtagcctgtgttggagggacaccagtgcactaggcagctggggcggcccaggctgaagccatctccgggtgtctgagaaaccacccagtgcctcacctccagatcctgctggcatcacctccagagccctgcatgcactggctgaagagttggtctgtggagaggattttcttggttacttgtattcacggttaatttacaacccaaacagcaaaacacagttggtggacaagttcatgcaggacctacagtgacccagccatgggcactagctcatctttcaggtggaaaagtacagtgctgcctgccctggtatgtttttcttatagatgttagccctgcccaacagccagggctacactacaaaaggcaagaatgcccatgtaaggagcccagcagtctggacagatccttcttcctctgctgttggatgagagtgagtgagtatgctctggaccttatccttgaaagatgatcaaaagcgatgatgagggaggcagtcatcacgcaggtgcttaaagggacattgtaggaggtactcaagggtttgggggcaaaaccctgaatccagccagtcgtgcacagagacacacccacactagcccagtggcagtgggggatgtgggatggcagcagccaggtatgtagccctgtcacaggacagctcactgtggttttgcacactgcctaagggttaaattgtgttgttgccttcagtagaaggcatttgtgggctgcagagttgagagttgggtgaggttagtctctcctgaagaaaaagcctataaaaagtggctaatcttatcccttttctctgtatgcagttggactcgtcagagatagtaaaatcatcttttagtgtttttttgttgctgatgtcttgtacccatttgttttttacatggggttgtagatcgagttctcaaaggtgaaaccagatgatcattctgataaaggaaatttaaatttgatacatatgctttgtatattttgattacttgttttcgtttttgactataaaggagcttttttattttgggaggggaggagtgtcatttttgagaatcttgggttcctgaaaaagaacgccctagttggatggcttgccagggccttggggtttggtagtgattgtacaacttaaagctcctttctcttggctgagtgacaggtggctgttcaggtggaccaaagcaccttgacacaaggactccacactgtgctctctagtagcacaaggaggaagttggacagaacattgggtagtgccttgcgggctcacacatgtactagtggtctcatctccagctagccttgggaggccgtcccaccaggaaatctctctattccgtagcctgagatgtgcccttgtgggttttatcctgctcagtcagtggcctaggggcaggtcctgtgttctctccctctctctcctggctctgggacatctgtccctggctgcctttcatggaggaaggacactggcctttctggttggatgctgtgtggatgctctctgcttgagcctcgtggtctcttgtctctttttggaccaatatcctcagattggtgcagctttttcagttcagatatcacaccccaagtggataaaggcaacttgcaggagaggagagccagccaagaagaaaattttaaaaccaaacctcgtttaggattttcctaaagtcatcttctcttttttcttgctcagagtttacctgggagatttcaccagtttgactcaccatttgcagatgtgcttttgtattaaatttaaattttcacatatcacatccattctcaaggtagttatatgctggagaagaaaaatcctctagacacatgaaggcccacatagtcaagtcttccagggcaaagccagcagcccacccaggtcaggtagccagcagggctcagttcccctcactccagacacggaccctcctcttcagggtctcttgacccagcttccttctctccttttacctgagagcacagacctctctcagccagcctgcccagaccacggggggctactcccatgtagtttggggagcacttgatctcagaaaagctccattgtctgagcaaatgggcagttgtggagctcaagcctttctcctgtgctcaagtcccttccccaagcaaggcttcaacctcatctacccaccatgtagttttctctggccatttaagtggggcggcagggacatggttgggccatgccacaccagggctggtgaggcaaccagttttgattttgacagagtggctggaggaaaagtggcaatcaaggtgctgcttggtttgctctgagtgcaaatggaaccaacaggtttctgctgcaatctgtgtgttcccagtgccaggtcacaccaggaggggtggggcagggctaaccaagtggtctctgaactcaccgagcgtctgcacttggttgtgaagttaatgggagtacagagagcgtctggccttggagaggggttgagagcctcctttttggttcttcattcctgagctcttgcctgcccacaaatctgacctctttgaatggggacgcagtccttcaacagagaagtttctatggcaaagaagtttctatttagctctagatccagcagagtcatccattctaactgccctgaagtctagagcaggggagggaacccagaggctggggatgagactaggcagaccctggttaccatatggacaaggacaggggaaagcacccccttcctcaatttctgaaagttctatctttgggttcgcaggactttgaggatgataaagaacatataggtactagcttgttgttgctggtccaaagcttccacagccctgagaatttggctttcgtggctgctctggcagctgagcgaagggaggaaggcagccgctctggtggggactctaggcaccttccctgctgtccacttggataggcggtgagccccagggtactgagaggagcctgagcatttacctgccattagtgcctcttccttcaggagactggcttgaaacgtgtgttcatgtgcgcgtgcacacacacacatgagcacctgtatgtgttaatgaatagtttttcttggttaatgctttttaacttctgttcctttccgtaagtggatgattcaaaattaacgtgacttggctgggcgcagtggctcacacctgtaatcccagcactttgggaggccaagggaggcggatcacctgaggtcaggagttcgagaccagcctgatcggcatggtgaaaccccgtttctactaaaaatacaaaaattagccgggcgtggtggtgcgcgcctgtaatcccagctactcaggaggctgaggaaggagaatcacttgaacccgggaggtggaggttgcagtgagctgagatcgtgccactgcactccagcctgggcgacagagcgaaactccgtctcaaaaaaaaaaaaaaaacttaatgtgactggagttaaaagtgaaatgtcaggttgtttagtcactgaatagagagctacaagtgcttggtctttcccaagaatcaaacctgagtagaaatacatttaaaagaaaaatctacatggtacctatgaatcctgtaatttgtttagggagatcttgtcactcatccctggttcctgcccatactgtttggtctcgttcttgcagtttgcttggaacagggccagagccccacatgagattgtcagcaggagtgaggagcgccagtccctactcctcagcagggacccagcacagcaatccggttgttctcggttagactgggtcggggccaggggagaagcagtcacccctgtgtagagggttcccgctgtgcttctgagcagttgctttgttcagaagtgttaggagggtcagattgtgccataattgttattaaagagaaaacacgcccaccttcctttctcccctgctggccattgttcattgagttttactgagggcagcctttgtggaagtcagggaggttgccaaaggcctgtagatgcctcctgacaaggtcttgattcctggttttctagcacccatttgcattttggtcttcagcacaaagccttgttccctgtggccggacttctgggcaataagactggggagtgactgttgagcagtctgctgtcaggagagatggctgaaaaggtgatcatcttggtgctaaacaagtaagaggcaactgccctgtttttgtttgttttgaggcacaatgaaactttagccaaactctgcaagagggtcccatctcctgccatggccaggtgtgagagaccaaaccgagaaaacagcatactctatcacttaagccttgggtagaatgggaattctttaccctgggtaaacgttttaacaaaaaaatggaacttaacttcggtttggactgtggtcgtgctgaggcaggagtggggttgccctcttggggctgaatctccaggcctcacgaggtcccctgtggggatgctgctatttctaagatgcaaattgcacatttcctagattttgtatctgtggatttggataagggaggggaacacggacaaattgcttgtacaatttgaaatgggcctcaatggtacttcaaaccttttgattattcctaaataaaaacataaatatatttcac

SEQ ID NO: 10108 - protein, 956 aa, Homo sapiens; identical to SEQ ID NO: 1269

SEQ ID NO: 10109 - DNA, 7234 bp, Homo sapiens
gtgaaaagacctagatggtagaaggcaagcagtggaatgtgtctgggtatccgagaaatatacagaaagcacttaagagaacttaatcatttttttctccctttccttagattgaatagggaaaacctgctttctgcaaacaactgaaaaagctgcatttagaaactgtttctttggccctcatcgagaagctggaacttgtattgttaggccccttatgggacaagctctcaactgctgatcacccagtgattgtcaccatggccagcaagaggaaatccaccacaccatgcatgatcccagtgaagactgtggtgttgcaagatgccagcatggaggcccagcccgctgagaccttgcctgaaggaccccagcaggatctgcccccagaagcatctgctgccagcagtgaggcagcacagaaccccagcagtatcagagccctttgacacatcgagtccccaggctggacgtcagctcgaaacagactgaatttgatctgattaatgtgaaggactggccagtctgggaaaccgcctgccacgtggaagagccaaacccgactctctgctgccacatgccgttcccatgcccggctgctgggcacctgggagagcttccagaatcctcgcagacagcccagagcctgccgctaccctcggcctgcccaccaccaagcaagcagcaagcaagatggggttctcatcagttcttcctcccacaatgtaggacctttcctttaccttccaatggataaaatagttcagagttcatagtcatattcatagacacagaatcaagcttttaacatatacatccacctctatatgttaaataaaacatcagattatcaacactgtcattacgtagaaactttggttagccaagcagtgcattgtcagttacgtcatctctaaaaatgacctgtgtctgttctctggggattgctgggtcacaggtgcccctcaccttccacagtcaggcagggaagttataggcacaaagctacgtctggaacccctttgtgccccctttgtgttcctcaaggaagcagtacctttgaagagatctctgctgcattaagtgatgaccggctacgtttcatgtcaggcttgctttgccttgtgggctactcagtgcagaacctgctgtaaccctcagttcaaaaaatggactggcaatgtgattagcgttggatgctttaccattctctttagttgttaccgtaattctgctttttcatgggagtttgaatcatggaccataacttttcagttatcagatcaactaaagaaacatttgttgttaagcctaatgtgctgacctatgtgcctgcattttttttttaatctagacatgtttggagtgagagaaagatggaaaaaagacatggggtagggacgtaagtggaaatctatagccacagcctgaagctttgaccactgcggttttcagagccctttctccacactcatttcagagcctcctatggtttgggaaggaataacacactggcccattagtaagggtgaaggctggagggatttgttgacttcttggaattatcagaggtagggtggtctttagcacaaagacttgcatgcagagatccctggcagaacacccagagtgcccgtggctcccaccccagggtctggccggtgtgctggatgcatgcccaagggtgctgggcatcactggtccttgtgaggatgcttttaaagttttatatttatgtccccaaacttggaaacaagaactctactttagcctaaccctcatgtccttttttgaattgagaaaattacaggaaatggtgcctttgaaaattagaaaacttgcttacagagctgttctaaatggtaaatcctcaatttccccaagaccggttgctctgagagtagctggtaaagaggggcgaactaaagacctgtccacctgtagctccgctcatttcttagaaaccacctgcttcccagagtgccaagccacaagtaccaggcttcgtgggcacagacacctcctgggctgggcagagtgacagtgctagaagaccccagagagagggcaagggctttgggcaagaagcactggtggtgttttagggaccgtccttctcccctacccagggaactggacctggcagggcaccgtgctcatgtggctccaaggacaagcatggcggtggccccttctgccttccaggagaggtcttgcttttgaaaccaaaatcatgttcttctaaagtgtcatcttctgccctccctgtcccaatagggaccacatcttatttgtctcaaacagggacttgtgagtacttggcaagttttgcagcctatttttgtattcttaatttggggagtaaagatgtttggtctcaaaaacctttgaggaattgccaagaatggcgagtgattgctttccttcagagaacagacacttggaatttctccttttagtgtttatatacgtgcagattaatttatatatatatatatacacacacacatatacagtataaatactcatttgattctcgtaaaacgcgcatctggcgtgtgcagttgagaaacttggtggcacatgggtgttgggggagtagcctgtgttggagggacaccagtgcactaggcagctggggcggcccaggctgaagccatctccgggtgtctgagaaaccacccagtgcctcacctccagatcctgctggcatcacctccagagccctgcatgcactggctgaagagttggtctgtggagaggattttcttggttacttgtattcacggttaatttacaacccaaacagcaaaacacagttggtggacaagttcatgcaggacctacagtgacccagccatgggcactagctcatctttcaggtggaaaagtacagtgctgcctgccctggtatgtttttcttatagatgttagccctgcccaacagccagggctacactacaaaaggcaagaatgcccatgtaaggagcccagcagtctggacagatccttcttcctctgctgttggatgagagtgagtgagtatgctctggaccttatccttgaaagatgatcaaaagcgatgatgagggaggcagtcatcacgcaggtgcttaaagggacattgtaggaggtactcaagggtttgggggcaaaaccctgaatccagccagtcgtgcacagagacacacccacactagcccagtggcagtgggggatgtgggatggcagcagccaggtatgtagccctgtcacaggacagctcactgtggttttgcacactgcctaagggttaaattgtgttgttgccttcagtagaaggcatttgtgggctgcagagttgagagttgggtgaggttagtctctcctgaagaaaaagcctataaaaagtggctaatcttatcccttttctctgtatgcagttggactcgtcagagatagtaaaatcatcttttagtgtttttttgttgctgatgtcttgtacccatttgttttttacatggggttgtagatcgagttctcaaaggtgaaaccagatgatcattctgataaaggaaatttaaatttgatacatatgctttgtatattttgattacttgttttcgtttttgactataaaggagcttttttattttgggaggggaggagtgtcatttttgagaatcttgggttcctgaaaaagaacgccctagttggatggcttgccagggccttggggtttggtagtgattgtacaacttaaagctcctttctcttggctgagtgacaggtggctgttcaggtggaccaaagcaccttgacacaaggactccacactgtgctctctagtagcacaaggaggaagttggacagaacattgggtagtgccttgcgggctcacacatgtactagtggtctcatctccagctagccttgggaggccgtcccaccaggaaatctctctattccgtagcctgagatgtgcccttgtgggttttatcctgctcagtcagtggcctaggggcaggtcctgtgttctctccctctctctcctggctctgggacatctgtccctggctgcctttcatggaggaaggacactggcctttctggttggatgctgtgtggatgctctctgcttgagcctcgtggtctcttgtctctttttggaccaatatcctcagattggtgcagctttttcagttcagatatcacaccccaagtggataaaggcaacttgcaggagaggagagccagccaagaagaaaattttaaaaccaaacctcgtttaggattttcctaaagtcatcttctcttttttcttgctcagagtttacctgggagatttcaccagtttgactcaccatttgcagatgtgcttttgtattaaatttaaattttcacatatcacatccattctcaaggtagttatatgctggagaagaaaaatcctctagacacatgaaggcccacatagtcaagtcttccagggcaaagccagcagcccacccaggtcaggtagccagcagggctcagttcccctcactccagacacggaccctcctcttcagggtctcttgacccagcttccttctctccttttacctgagagcacagacctctctcagccagcctgcccagaccacggggggctactcccatgtagtttggggagcacttgatctcagaaaagctccattgtctgagcaaatgggcagttgtggagctcaagcctttctcctgtgctcaagtcccttccccaagcaaggcttcaacctcatctacccaccatgtagttttctctggccatttaagtggggcggcagggacatggttgggccatgccacaccagggctggtgaggcaaccagttttgattttgacagagtggctggaggaaaagtggcaatcaaggtgctgcttggtttgctctgagtgcaaatggaaccaacaggtttctgctgcaatctgtgtgttcccagtgccaggtcacaccaggaggggtggggcagggctaaccaagtggtctctgaactcaccgagcgtctgcacttggttgtgaagttaatgggagtacagagagcgtctggccttggagaggggttgagagcctcctttttggttcttcattcctgagctcttgcctgcccacaaatctgacctctttgaatggggacgcagtccttcaacagagaagtttctatggcaaagaagtttctatttagctctagatccagcagagtcatccattctaactgccctgaagtctagagcaggggagggaacccagaggctggggatgagactaggcagaccctggttaccatatggacaaggacaggggaaagcacccccttcctcaatttctgaaagttctatctttgggttcgcaggactttgaggatgataaagaacatataggtactagcttgttgttgctggtccaaagcttccacagccctgagaatttggctttcgtggctgctctggcagctgagcgaagggaggaaggcagccgctctggtggggactctaggcaccttccctgctgtccacttggataggcggtgagccccagggtactgagaggagcctgagcatttacctgccattagtgcctcttccttcaggagactggcttgaaacgtgtgttcatgtgcgcgtgcacacacacacatgagcacctgtatgtgttaatgaatagtttttcttggttaatgctttttaacttctgttcctttccgtaagtggatgattcaaaattaacgtgacttggctgggcgcagtggctcacacctgtaatcccagcactttgggaggccaagggaggcggatcacctgaggtcaggagttcgagaccagcctgatcggcatggtgaaaccccgtttctactaaaaatacaaaaattagccgggcgtggtggtgcgcgcctgtaatcccagctactcaggaggctgaggaaggagaatcacttgaacccgggaggtggaggttgcagtgagctgagatcgtgccactgcactccagcctgggcgacagagcgaaactccgtctcaaaaaaaaaaaaaaaacttaatgtgactggagttaaaagtgaaatgtcaggttgtttagtcactgaatagagagctacaagtgcttggtctttcccaagaatcaaacctgagtagaaatacatttaaaagaaaaatctacatggtacctatgaatcctgtaatttgtttagggagatcttgtcactcatccctggttcctgcccatactgtttggtctcgttcttgcagtttgcttggaacagggccagagccccacatgagattgtcagcaggagtgaggagcgccagtccctactcctcagcagggacccagcacagcaatccggttgttctcggttagactgggtcggggccaggggagaagcagtcacccctgtgtagagggttcccgctgtgcttctgagcagttgctttgttcagaagtgttaggagggtcagattgtgccataattgttattaaagagaaaacacgcccaccttcctttctcccctgctggccattgttcattgagttttactgagggcagcctttgtggaagtcagggaggttgccaaaggcctgtagatgcctcctgacaaggtcttgattcctggttttctagcacccatttgcattttggtcttcagcacaaagccttgttccctgtggccggacttctgggcaataagactggggagtgactgttgagcagtctgctgtcaggagagatggctgaaaaggtgatcatcttggtgctaaacaagtaagaggcaactgccctgtttttgtttgttttgaggcacaatgaaactttagccaaactctgcaagagggtcccatctcctgccatggccaggtgtgagagaccaaaccgagaaaacagcatactctatcacttaagccttgggtagaatgggaattctttaccctgggtaaacgttttaacaaaaaaatggaacttaacttcggtttggactgtggtcgtgctgaggcaggagtggggttgccctcttggggctgaatctccaggcctcacgaggtcccctgtggggatgctgctatttctaagatgcaaattgcacatttcctagattttgtatctgtggatttggataagggaggggaacacggacaaattgcttgtacaatttgaaatgggcctcaatggtacttcaaaccttttgattattcctaaataaaaacataaatatatttcac

SEQ ID NO: 10110 - protein, 62 aa, Homo sapiens
MASKRKSTTPCMIPVKTVVLQDASMEAQPAETLPEGPQQDLPPEASAASSEAAQNPSSIRAL

SEQ ID NO: 10111 - DNA, 8941 bp, Homo sapiens
agcaaatagactgaatgaaagatgagcttctgcctttatatccttctctcctgctacccaactcattgtggtgaaggaaaaagaaaacgcgggtggagactgcactatatgcttaggactgaaatgcaactgcagaagcaacatgtgaccttttagagatgcttgtgggactgcataaagtgaagagggaaactggaaaaaaacaatgaaattgaatagggaaaacctgctttctgcaaacaactgaaaaagctgcatttagaaactgtttctttggccctcatcgagaagctggaacttgtattgttaggccccttatgggacaagctctcaactgctgatcacccagtgattgtcaccatggccagcaagaggaaatccaccacaccatgcatgatcccagtgaagactgtggtgttgcaagatgccagcatggaggcccagcccgctgagaccttgcctgaaggaccccagcaggatctgcccccagaagcatctgctgccagcagtgaggcagcacagaaccccagcagtactgatggctctacactggccaatgggcatcggagcactttagatggctatttatattcctgtaaatactgcgatttcagatcccatgacatgacccaatttgtgggacatatgaactcagagcacacagactttaataaagacccaacctttgtatgcagtgggtgcagttttctggcaaaaacccctgaggggctttccttgcacaatgccacatgtcactccggggaagccagctttgtgtggaacgtggccaagccagacaatcatgtggttgtggagcagagcatccctgagagcaccagcactcctgacctagcgggtgagcccagtgctgaaggggctgatggacaggcagaaatcatcattaccaaaactccaatcatgaagataatgaaaggcaaagctgaagccaaaaaaattcatacactcaaggagaatgtccctagccagcctgtgggtgaggccttaccaaagctgtcgactggagaaatggaggtgagagagggggaccattccttcatcaatggggcagttccagtcagccaggcatctgccagctctgcaaaaaacccccatgccgccaacgggcccctgataggaacagtgccagttttgccagctggcatagcacagttcctctccctccagcagcagcccccagtgcatgcccaacaccatgtccaccagccactgcccacggccaaggcccttcccaaagtgatgatccccctgagcagcattccaacgtacaatgcagccatggactctaacagcttcctgaagaactccttccacaagttcccctaccccaccaaagccgagctctgctatttgactgtggtgaccaagtatccagaagaacagctcaagatctggttcacagcccaaaggctgaagcaggggatcagctggtcccctgaggagattgaggatgcccggaaaaagatgttcaatacagtcatccagtctgtgcctcagcccacaattacggttctaaataccccactcgtcgccagtgctggcaatgtccagcatctcatccaggccgctcttccaggtcacgttgtggggcagccagagggtacaggagggggacttctggtcactcagccattgatggccaatgggttgcaagcaacaagttcccctctccccctcacggtgacatccgtccccaagcagccaggtgtggcacccattaacactgtgtgttcaaatacaacgtcagctgtgaaggtggtcaatgcggcccagtcgctcctcacggcctgccccagcataacctcccaagccttccttgatgctagcatctacaaaaataagaaatctcatgaacagctgtcagctctgaaagggagcttctgtcggaaccagttcccagggcagagcgaagttgaacatctcacaaaagtgacgggcctcagtaccagagaggtgcggaaatggttcagtgatcgtagataccactgccggaacttgaagggctccagagcgatgatacctggagatcacagttccatcatcattgactctgtgccagaggtgtccttctccccatcgtccaaggtccctgaggtaacctgcattccgacaacagccacactagcaacccacccttctgccaaacgacaatcttggcaccagactcctgacttcacaccaaccaaatacaaggagagagcccctgagcagctcagagccctggagagcagttttgcacaaaaccctcttcctcttgatgaggaactggaccgcctgagaagtgaaaccaaaatgacccgacgagaaattgatagctggttttcagagagacggaaaaaagtgaatgctgaggagaccaagaaggctgaggagaatgcctctcaggaggaagaggaggctgctgaggatgagggtggagaagaggatttggccagtgagctaagggtctctggtgaaaatggctctctggaaatgcccagcagccatatcttggcagagcgcaaagtcagccccattaaaatcaacctgaagaacctgagggtcactgaagccaatggcaggaacgagattccagggctgggtgcctgtgaccctgaggatgatgagtcaaacaaactggcagagcagctcccaggcaaagtgagctgcaaaaagactgcccagcagcggcacttgctgcggcagctctttgtccagacacagtggccaagcaaccaggactatgactccatcatggcccagacgggtctgccacggccagaggtggtgcgctggtttggagatagcaggtacgcactgaagaacggccaactcaaatggtacgaagactataagcgaggcaacttcccaccagggctactggtcattgcccctggcaaccgggagctcctgcaggactattacatgacacacaagatgctgtatgaagaggacctgcagaacctctgtgacaagacccagatgagctcccagcaggtcaagcagtggtttgctgagaaaatgggggaggagaccagagccgtggcagacacaggcagtgaggaccagggccctggtactggtgagctcacagcagttcacaaagggatgggtgacacctattcagaggtgtctgagaacagtgagtcgtgggagccccgtgtccctgaggccagctcagagccctttgacacatcgagtccccaggctggacgtcagctcgaaacagactgaatttgatctgattaatgtgaaggactggccagtctgggaaaccgcctgccacgtggaagagccaaacccgactctctgctgccacatgccgttcccatgcccggctgctgggcacctgggagagcttccagaatcctcgcagacagcccagagcctgccgctaccctcggcctgcccaccaccaagcaagcagcaagcaagatggggttctcatcagttcttcctcccacaatgtaggacctttcctttaccttccaatggataaaatagttcagagttcatagtcatattcatagacacagaatcaagcttttaacatatacatccacctctatatgttaaataaaacatcagattatcaacactgtcattacgtagaaactttggttagccaagcagtgcattgtcagttacgtcatctctaaaaatgacctgtgtctgttctctggggattgctgggtcacaggtgcccctcaccttccacagtcaggcagggaagttataggcacaaagctacgtctggaacccctttgtgccccctttgtgttcctcaaggaagcagtacctttgaagagatctctgctgcattaagtgatgaccggctacgtttcatgtcaggcttgctttgccttgtgggctactcagtgcagaacctgctgtaaccctcagttcaaaaaatggactggcaatgtgattagcgttggatgctttaccattctctttagttgttaccgtaattctgctttttcatgggagtttgaatcatggaccataacttttcagttatcagatcaactaaagaaacatttgttgttaagcctaatgtgctgacctatgtgcctgcattttttttttaatctagacatgtttggagtgagagaaagatggaaaaaagacatggggtagggacgtaagtggaaatctatagccacagcctgaagctttgaccactgcggttttcagagccctttctccacactcatttcagagcctcctatggtttgggaaggaataacacactggcccattagtaagggtgaaggctggagggatttgttgacttcttggaattatcagaggtagggtggtctttagcacaaagacttgcatgcagagatccctggcagaacacccagagtgcccgtggctcccaccccagggtctggccggtgtgctggatgcatgcccaagggtgctgggcatcactggtccttgtgaggatgcttttaaagttttatatttatgtccccaaacttggaaacaagaactctactttagcctaaccctcatgtccttttttgaattgagaaaattacaggaaatggtgcctttgaaaattagaaaacttgcttacagagctgttctaaatggtaaatcctcaatttccccaagaccggttgctctgagagtagctggtaaagaggggcgaactaaagacctgtccacctgtagctccgctcatttcttagaaaccacctgcttcccagagtgccaagccacaagtaccaggcttcgtgggcacagacacctcctgggctgggcagagtgacagtgctagaagaccccagagagagggcaagggctttgggcaagaagcactggtggtgttttagggaccgtccttctcccctacccagggaactggacctggcagggcaccgtgctcatgtggctccaaggacaagcatggcggtggccccttctgccttccaggagaggtcttgcttttgaaaccaaaatcatgttcttctaaagtgtcatcttctgccctccctgtcccaatagggaccacatcttatttgtctcaaacagggacttgtgagtacttggcaagttttgcagcctatttttgtattcttaatttggggagtaaagatgtttggtctcaaaaacctttgaggaattgccaagaatggcgagtgattgctttccttcagagaacagacacttggaatttctccttttagtgtttttgattctcgtaaaacgcgcatctggcgtgtgcagttgagaaacttggtggcacatgggtgttgggggagtagcctgtgttggagggacaccagtgcactaggcagctggggcggcccaggctgaagccatctccgggtgtctgagaaaccacccagtgcctcacctccagatcctgctggcatcacctccagagccctgcatgcactggctgaagagttggtctgtggagaggattttcttggttacttgtattcacggttaatttacaacccaaacagcaaaacacagttggtggacaagttcatgcaggacctacagtgacccagccatgggcactagctcatctttcaggtggaaaagtacagtgctgcctgccctggtatgtttttcttatagatgttagccctgcccaacagccagggctacactacaaaaggcaagaatgcccatgtaaggagcccagcagtctggacagatccttcttcctctgctgttggatgagagtgagtgagtatgctctggaccttatccttgaaagatgatcaaaagcgatgatgagggaggcagtcatcacgcaggtgcttaaagggacattgtaggaggtactcaagggtttgggggcaaaaccctgaatccagccagtcgtgcacagagacacacccacactagcccagtggcagtgggggatgtgggatggcagcagccaggtatgtagccctgtcacaggacagctcactgtggttttgcacactgcctaagggttaaattgtgttgttgccttcagtagaaggcatttgtgggctgcagagttgagagttgggtgaggttagtctctcctgaagaaaaagcctataaaaagtggctaatcttatcccttttctctgtatgcagttggactcgtcagagatagtaaaatcatcttttagtgtttttttgttgctgatgtcttgtacccatttgttttttacatggggttgtagatcgagttctcaaaggtgaaaccagatgatcattctgataaaggaaatttaaatttgatacatatgctttgtatattttgattacttgttttcgtttttgactataaaggagtcttttttcttgctcagagtttacctgggagatttcaccagtttgactcaccatttgcagatgtgcttttgtattaaatttaaattttcacatatcacatccattctcaaggtagttatatgctggagaagaaaaatcctctagacacatgaaggcccacatagtcaagtcttccagggcaaagccagcagcccacccaggtcaggtagccagcagggctcagttcccctcactccagacacggaccctcctcttcagggtctcttgacccagcttccttctctccttttacctgagagcacagacctctctcagccagcctgcccagaccacggggggctactcccatgtagtttggggagcacttgatctcagaaaagctccattgtctgagcaaatgggcagttgtggagctcaagcctttctcctgtgctcaagtcccttccccaagcaaggcttcaacctcatctacccaccatgtagttttctctggccatttaagtggggcggcagggacatggttgggccatgccacaccagggctggtgaggcaaccagttttgattttgacagagtggctggaggaaaagtggcaatcaaggtgctgcttggtttgctctgagtgcaaatggaaccaacaggtttctgctgcaatctgtgtgttcccagtgccaggtcacaccaggaggggtggggcagggctaaccaagtggtctctgaactcaccgagcgtctgcacttggttgtgaagttaatgggagtacagagagcgtctggccttggagaggggttgagagcctcctttttggttcttcattcctgagctcttgcctgcccacaaatctgacctctttgaatggggacgcagtccttcaacagagaagtttctatggcaaagaagtttctatttagctctagatccagcagagtcatccattctaactgccctgaagtctagagcaggggagggaacccagaggctggggatgagactaggcagaccctggttaccatatggacaaggacaggggaaagcacccccttcctcaatttctgaaagttctatctttgggttcgcaggactttgaggatgataaagaacatataggtactagcttgttgttgctggtccaaagcttccacagccctgagaatttggctttcgtggctgctctggcagctgagcgaagggaggaaggcagccgctctggtggggactctaggcaccttccctgctgtccacttggataggcggtgagccccagggtactgagaggagcctgagcatttacctgccattagtgcctcttccttcaggagactggcttgaaacgtgtgttcatgtgcgcgtgcacacacacacatgagcacctgtatgtgttaatgaatagtttttcttggttaatgctttttaacttctgttcctttccgtaagtggatgattcaaaattaacgtgacttcttaatgtgactggagttaaaagtgaaatgtcaggttgtttagtcactgaatagagagctacaagtgcttggtctttcccaagaatcaaacctgagtagaaatacatttaaaagaaaaatctacatggtacctatgaatcctgtaatttgtttagggagatcttgtcactcatccctggttcctgcccatactgtttggtctcgttcttgcagtttgcttggaacagggccagagccccacatgagattgtcagcaggagtgaggagcgccagtccctactcctcagcagggacccagcacagcaatccggttgttctcggttagactgggtcggggccaggggagaagcagtcacccctgtgtagagggttcccgctgtgcttctgagcagttgctttgttcagaagtgttaggagggtcagattgtgccataattgttattaaagagaaaacacgcccaccttcctttctcccctgctggccattgttcattgagttttactgagggcagcctttgtggaagtcagggaggttgccaaaggcctgtagatgcctcctgacaaggtcttgattcctggttttctagcacccatttgcattttggtcttcagcacaaagccttgttccctgtggccggacttctgggcaataagactggggagtgactgttgagcagtctgctgtcaggagagatggctgaaaaggtgatcatcttggtgctaaacaagtaagaggcaactgccctgtttttgtttgttttgaggcacaatgaaactttagccaaactctgcaagagggtcccatctcctgccatggccaggtgtgagagaccaaaccgagaaaacagcatactctatcacttaagccttgggtagaatgggaattctttaccctgggtaaacgttttaacaaaaaaatggaacttaacttcggtttggactgtggtcgtgctgaggcaggagtggggttgccctcttggggctgaatctccaggcctcacgaggtcccctgtggggatgctgctatttctaagatgcaaattgcacatttcctagattttgtatctgtggatttggataagggaggggaacacggacaaattgcttgtacaatttgaaatgggcctcaatggtacttcaaaccttttgattattcctaaataaaaacataaatatatttcac

SEQ ID NO: 10112 - protein, 956 aa, Homo sapiens; identical to SEQ ID NO: 1269

SEQ ID NO: 10113 - DNA, 9991 bp, Homo sapiens; identical to SEQ ID NO: 1268

SEQ ID NO: 10114 - protein, 956 aa, Homo sapiens; identical to SEQ ID NO: 1269

SEQ ID NO: 10115 - DNA, 9951 bp, Homo sapiens
cctgcgccggccgcccgcccggccgcggggagggaggcccgcagcgcgggaagagcggcccggtcgcgggcgccgccaccgccgccgctgccaggactgaaatgcaactgcagaagcaacatgtgaccttttagagatgcttgtgggactgcataaagtgaagagggaaactggaaaaaaacaatgaaattgaatagggaaaacctgctttctgcaaacaactgaaaaagctgcatttagaaactgtttctttggccctcatcgagaagctggaacttgtattgttaggccccttatgggacaagctctcaactgctgatcacccagtgattgtcaccatggccagcaagaggaaatccaccacaccatgcatgatcccagtgaagactgtggtgttgcaagatgccagcatggaggcccagcccgctgagaccttgcctgaaggaccccagcaggatctgcccccagaagcatctgctgccagcagtgaggcagcacagaaccccagcagtactgatggctctacactggccaatgggcatcggagcactttagatggctatttatattcctgtaaatactgcgatttcagatcccatgacatgacccaatttgtgggacatatgaactcagagcacacagactttaataaagacccaacctttgtatgcagtgggtgcagttttctggcaaaaacccctgaggggctttccttgcacaatgccacatgtcactccggggaagccagctttgtgtggaacgtggccaagccagacaatcatgtggttgtggagcagagcatccctgagagcaccagcactcctgacctagcgggtgagcccagtgctgaaggggctgatggacaggcagaaatcatcattaccaaaactccaatcatgaagataatgaaaggcaaagctgaagccaaaaaaattcatacactcaaggagaatgtccctagccagcctgtgggtgaggccttaccaaagctgtcgactggagaaatggaggtgagagagggggaccattccttcatcaatggggcagttccagtcagccaggcatctgccagctctgcaaaaaacccccatgccgccaacgggcccctgataggaacagtgccagttttgccagctggcatagcacagttcctctccctccagcagcagcccccagtgcatgcccaacaccatgtccaccagccactgcccacggccaaggcccttcccaaagtgatgatccccctgagcagcattccaacgtacaatgcagccatggactctaacagcttcctgaagaactccttccacaagttcccctaccccaccaaagccgagctctgctatttgactgtggtgaccaagtatccagaagaacagctcaagatctggttcacagcccaaaggctgaagcaggggatcagctggtcccctgaggagattgaggatgcccggaaaaagatgttcaatacagtcatccagtctgtgcctcagcccacaattacggttctaaataccccactcgtcgccagtgctggcaatgtccagcatctcatccaggccgctcttccaggtcacgttgtggggcagccagagggtacaggagggggacttctggtcactcagccattgatggccaatgggttgcaagcaacaagttcccctctccccctcacggtgacatccgtccccaagcagccaggtgtggcacccattaacactgtgtgttcaaatacaacgtcagctgtgaaggtggtcaatgcggcccagtcgctcctcacggcctgccccagcataacctcccaagccttccttgatgctagcatctacaaaaataagaaatctcatgaacagctgtcagctctgaaagggagcttctgtcggaaccagttcccagggcagagcgaagttgaacatctcacaaaagtgacgggcctcagtaccagagaggtgcggaaatggttcagtgatcgtagataccactgccggaacttgaagggctccagagcgatgatacctggagatcacagttccatcatcattgactctgtgccagaggtgtccttctccccatcgtccaaggtccctgaggtaacctgcattccgacaacagccacactagcaacccacccttctgccaaacgacaatcttggcaccagactcctgacttcacaccaaccaaatacaaggagagagcccctgagcagctcagagccctggagagcagttttgcacaaaaccctcttcctcttgatgaggaactggaccgcctgagaagtgaaaccaaaatgacccgacgagaaattgatagctggttttcagagagacggaaaaaagtgaatgctgaggagaccaagaaggctgaggagaatgcctctcaggaggaagaggaggctgctgaggatgagggtggagaagaggatttggccagtgagctaagggtctctggtgaaaatggctctctggaaatgcccagcagccatatcttggcagagcgcaaagtcagccccattaaaatcaacctgaagaacctgagggtcactgaagccaatggcaggaacgagattccagggctgggtgcctgtgaccctgaggatgatgagtcaaacaaactggcagagcagctcccaggcaaagtgagctgcaaaaagactgcccagcagcggcacttgctgcggcagctctttgtccagacacagtggccaagcaaccaggactatgactccatcatggcccagacgggtctgccacggccagaggtggtgcgctggtttggagatagcaggtacgcactgaagaacggccaactcaaatggtacgaagactataagcgaggcaacttcccaccagggctactggtcattgcccctggcaaccgggagctcctgcaggactattacatgacacacaagatgctgtatgaagaggacctgcagaacctctgtgacaagacccagatgagctcccagcaggtcaagcagtggtttgctgagaaaatgggggaggagaccagagccgtggcagacacaggcagtgaggaccagggccctggtactggtgagctcacagcagttcacaaagggatgggtgacacctattcagaggtgtctgagaacagtgagtcgtgggagccccgtgtccctgaggccagctcagagccctttgacacatcgagtccccaggctggacgtcagctcgaaacagactgaatttgatctgattaatgtgaaggactggccagtctgggaaaccgcctgccacgtggaagagccaaacccgactctctgctgccacatgccgttcccatgcccggctgctgggcacctgggagagcttccagaatcctcgcagacagcccagagcctgccgctaccctcggcctgcccaccaccaagcaagcagcaagcaagatggggttctcatcagttcttcctcccacaatgtaggacctttcctttaccttccaatggataaaatagttcagagttcatagtcatattcatagacacagaatcaagcttttaacatatacatccacctctatatgttaaataaaacatcagattatcaacactgtcattacgtagaaactttggttagccaagcagtgcattgtcagttacgtcatctctaaaaatgacctgtgtctgttctctggggattgctgggtcacaggtgcccctcaccttccacagtcaggcagggaagttataggcacaaagctacgtctggaacccctttgtgccccctttgtgttcctcaaggaagcagtacctttgaagagatctctgctgcattaagtgatgaccggctacgtttcatgtcaggcttgctttgccttgtgggctactcagtgcagaacctgctgtaaccctcagttcaaaaaatggactggcaatgtgattagcgttggatgctttaccattctctttagttgttaccgtaattctgctttttcatgggagtttgaatcatggaccataacttttcagttatcagatcaactaaagaaacatttgttgttaagcctaatgtgctgacctatgtgcctgcattttttttttaatctagacatgtttggagtgagagaaagatggaaaaaagacatggggtagggacgtaagtggaaatctatagccacagcctgaagctttgaccactgcggttttcagagccctttctccacactcatttcagagcctcctatggtttgggaaggaataacacactggcccattagtaagggtgaaggctggagggatttgttgacttcttggaattatcagaggtagggtggtctttagcacaaagacttgcatgcagagatccctggcagaacacccagagtgcccgtggctcccaccccagggtctggccggtgtgctggatgcatgcccaagggtgctgggcatcactggtccttgtgaggatgcttttaaagttttatatttatgtccccaaacttggaaacaagaactctactttagcctaaccctcatgtccttttttgaattgagaaaattacaggaaatggtgcctttgaaaattagaaaacttgcttacagagctgttctaaatggtaaatcctcaatttccccaagaccggttgctctgagagtagctggtaaagaggggcgaactaaagacctgtccacctgtagctccgctcatttcttagaaaccacctgcttcccagagtgccaagccacaagtaccaggcttcgtgggcacagacacctcctgggctgggcagagtgacagtgctagaagaccccagagagagggcaagggctttgggcaagaagcactggtggtgttttagggaccgtccttctcccctacccagggaactggacctggcagggcaccgtgctcatgtggctccaaggacaagcatggcggtggccccttctgccttccaggagaggtcttgcttttgaaaccaaaatcatgttcttctaaagtgtcatcttctgccctccctgtcccaatagggaccacatcttatttgtctcaaacagggacttgtgagtacttggcaagttttgcagcctatttttgtattcttaatttggggagtaaagatgtttggtctcaaaaacctttgaggaattgccaagaatggcgagtgattgctttccttcagagaacagacacttggaatttctccttttagtgtttatatacgtgcagattaatttatatatatatatatacacacacacatatacagtataaatactcatttgattctcgtaaaacgcgcatctggcgtgtgcagttgagaaacttggtggcacatgggtgttgggggagtagcctgtgttggagggacaccagtgcactaggcagctggggcggcccaggctgaagccatctccgggtgtctgagaaaccacccagtgcctcacctccagatcctgctggcatcacctccagagccctgcatgcactggctgaagagttggtctgtggagaggattttcttggttacttgtattcacggttaatttacaacccaaacagcaaaacacagttggtggacaagttcatgcaggacctacagtgacccagccatgggcactagctcatctttcaggtggaaaagtacagtgctgcctgccctggtatgtttttcttatagatgttagccctgcccaacagccagggctacactacaaaaggcaagaatgcccatgtaaggagcccagcagtctggacagatccttcttcctctgctgttggatgagagtgagtgagtatgctctggaccttatccttgaaagatgatcaaaagcgatgatgagggaggcagtcatcacgcaggtgcttaaagggacattgtaggaggtactcaagggtttgggggcaaaaccctgaatccagccagtcgtgcacagagacacacccacactagcccagtggcagtgggggatgtgggatggcagcagccaggtatgtagccctgtcacaggacagctcactgtggttttgcacactgcctaagggttaaattgtgttgttgccttcagtagaaggcatttgtgggctgcagagttgagagttgggtgaggttagtctctcctgaagaaaaagcctataaaaagtggctaatcttatcccttttctctgtatgcagttggactcgtcagagatagtaaaatcatcttttagtgtttttttgttgctgatgtcttgtacccatttgttttttacatggggttgtagatcgagttctcaaaggtgaaaccagatgatcattctgataaaggaaatttaaatttgatacatatgctttgtatattttgattacttgttttcgtttttgactataaaggagcttttttattttgggaggggaggagtgtcatttttgagaatcttgggttcctgaaaaagaacgccctagttggatggcttgccagggccttggggtttggtagtgattgtacaacttaaagctcctttctcttggctgagtgacaggtggctgttcaggtggaccaaagcaccttgacacaaggactccacactgtgctctctagtagcacaaggaggaagttggacagaacattgggtagtgccttgcgggctcacacatgtactagtggtctcatctccagctagccttgggaggccgtcccaccaggaaatctctctattccgtagcctgagatgtgcccttgtgggttttatcctgctcagtcagtggcctaggggcaggtcctgtgttctctccctctctctcctggctctgggacatctgtccctggctgcctttcatggaggaaggacactggcctttctggttggatgctgtgtggatgctctctgcttgagcctcgtggtctcttgtctctttttggaccaatatcctcagattggtgcagctttttcagttcagatatcacaccccaagtggataaaggcaacttgcaggagaggagagccagccaagaagaaaattttaaaaccaaacctcgtttaggattttcctaaagtcatcttctcttttttcttgctcagagtttacctgggagatttcaccagtttgactcaccatttgcagatgtgcttttgtattaaatttaaattttcacatatcacatccattctcaaggtagttatatgctggagaagaaaaatcctctagacacatgaaggcccacatagtcaagtcttccagggcaaagccagcagcccacccaggtcaggtagccagcagggctcagttcccctcactccagacacggaccctcctcttcagggtctcttgacccagcttccttctctccttttacctgagagcacagacctctctcagccagcctgcccagaccacggggggctactcccatgtagtttggggagcacttgatctcagaaaagctccattgtctgagcaaatgggcagttgtggagctcaagcctttctcctgtgctcaagtcccttccccaagcaaggcttcaacctcatctacccaccatgtagttttctctggccatttaagtggggcggcagggacatggttgggccatgccacaccagggctggtgaggcaaccagttttgattttgacagagtggctggaggaaaagtggcaatcaaggtgctgcttggtttgctctgagtgcaaatggaaccaacaggtttctgctgcaatctgtgtgttcccagtgccaggtcacaccaggaggggtggggcagggctaaccaagtggtctctgaactcaccgagcgtctgcacttggttgtgaagttaatgggagtacagagagcgtctggccttggagaggggttgagagcctcctttttggttcttcattcctgagctcttgcctgcccacaaatctgacctctttgaatggggacgcagtccttcaacagagaagtttctatggcaaagaagtttctatttagctctagatccagcagagtcatccattctaactgccctgaagtctagagcaggggagggaacccagaggctggggatgagactaggcagaccctggttaccatatggacaaggacaggggaaagcacccccttcctcaatttctgaaagttctatctttgggttcgcaggactttgaggatgataaagaacatataggtactagcttgttgttgctggtccaaagcttccacagccctgagaatttggctttcgtggctgctctggcagctgagcgaagggaggaaggcagccgctctggtggggactctaggcaccttccctgctgtccacttggataggcggtgagccccagggtactgagaggagcctgagcatttacctgccattagtgcctcttccttcaggagactggcttgaaacgtgtgttcatgtgcgcgtgcacacacacacatgagcacctgtatgtgttaatgaatagtttttcttggttaatgctttttaacttctgttcctttccgtaagtggatgattcaaaattaacgtgacttggctgggcgcagtggctcacacctgtaatcccagcactttgggaggccaagggaggcggatcacctgaggtcaggagttcgagaccagcctgatcggcatggtgaaaccccgtttctactaaaaatacaaaaattagccgggcgtggtggtgcgcgcctgtaatcccagctactcaggaggctgaggaaggagaatcacttgaacccgggaggtggaggttgcagtgagctgagatcgtgccactgcactccagcctgggcgacagagcgaaactccgtctcaaaaaaaaaaaaaaaacttaatgtgactggagttaaaagtgaaatgtcaggttgtttagtcactgaatagagagctacaagtgcttggtctttcccaagaatcaaacctgagtagaaatacatttaaaagaaaaatctacatggtacctatgaatcctgtaatttgtttagggagatcttgtcactcatccctggttcctgcccatactgtttggtctcgttcttgcagtttgcttggaacagggccagagccccacatgagattgtcagcaggagtgaggagcgccagtccctactcctcagcagggacccagcacagcaatccggttgttctcggttagactgggtcggggccaggggagaagcagtcacccctgtgtagagggttcccgctgtgcttctgagcagttgctttgttcagaagtgttaggagggtcagattgtgccataattgttattaaagagaaaacacgcccaccttcctttctcccctgctggccattgttcattgagttttactgagggcagcctttgtggaagtcagggaggttgccaaaggcctgtagatgcctcctgacaaggtcttgattcctggttttctagcacccatttgcattttggtcttcagcacaaagccttgttccctgtggccggacttctgggcaataagactggggagtgactgttgagcagtctgctgtcaggagagatggctgaaaaggtgatcatcttggtgctaaacaagtaagaggcaactgccctgtttttgtttgttttgaggcacaatgaaactttagccaaactctgcaagagggtcccatctcctgccatggccaggtgtgagagaccaaaccgagaaaacagcatactctatcacttaagccttgggtagaatgggaattctttaccctgggtaaacgttttaacaaaaaaatggaacttaacttcggtttggactgtggtcgtgctgaggcaggagtggggttgccctcttggggctgaatctccaggcctcacgaggtcccctgtggggatgctgctatttctaagatgcaaattgcacatttcctagattttgtatctgtggatttggataagggaggggaacacggacaaattgcttgtacaatttgaaatgggcctcaatggtacttcaaaccttttgattattcctaaataaaaacataaatatatttcac

SEQ ID NO: 10116 - protein, 956 aa, Homo sapiens; identical to SEQ ID NO: 1269

SEQ ID NO: 10117 - DNA, 498 bp, Homo sapiens
ggatgactctgctggatctagagctaaatagaaacttctttgccatagaaacttctctgttgaaggactgcgtccccattcaaagaggtcagatttgtgggcaggcaagagctcaggaatgaagaaccaaaaaggaggctctcaacccctctccaaggccagacgctctctgtactcccattaacttcacaaccaagtgcagacgctcgaccaactcttcagccagtgcatgcagggctctggaggtgatgccagcaggatctggaggatctcgctctgtaacccaggctctggaatgcagtggcacaaccacggctcactgcagtctcaacctcctgggctcaactgatccccccacttcagcctcctgagtagctgggactacagaggacactggaggtgaagaaggaagctcttgactctcctaaagctgatcccaaagtgaaggctttgaaggccaagaaggcagtgctgaaaggcatccacacagccaccaag

SEQ ID NO: 10118 - protein, 40 aa, Homo sapiens
MPAGSGGSRSVTQALECSGTTTAHCSLNLLGSTDPPTSAS

SEQ ID NO: 10119 - DNA, 3288 bp, Homo sapiens
gtggtgttgcaagatgccagcatggaggcccagcccgctgagaccttgcctgaaggaccccagcaggatctgcccccagaagcatctgctgccagcagtgaggcagcacagaaccccagcagtactgatggctctacactggccaatgggcatcggagcactttagatggctatttatattcctgtaaatactgcgatttcagatcccatgacatgacccaatttgtgggacatatgaactcagagcacacagactttaataaagacccaacctttgtatgcagtgggtgcagttttctggcaaaaacccctgaggggctttccttgcacaatgccacatgtcactccggggaagccagctttgtgtggaacgtggccaagccagacaatcatgtggttgtggagcagagcatccctgagagcaccagcactcctgacctagcgggtgagcccagtgctgaaggggctgatggacaggcagaaatcatcattaccaaaactccaatcatgaagataatgaaaggcaaagctgaagccaaaaaaattcatacactcaaggagaatgtccctagccagcctgtgggtgaggccttaccaaagctgtcgactggagaaatggaggtgagagagggggaccattccttcatcaatggggcagttccagtcagccaggcatctgccagctctgcaaaaaacccccatgccgccaacgggcccctgataggaacagtgccagttttgccagctggcatagcacagttcctctccctccagcagcagcccccagtgcatgcccaacaccatgtccaccagccactgcccacggccaaggcccttcccaaagtgatgatccccctgagcagcattccaacgtacaatgcagccatggactctaacagcttcctgaagaactccttccacaagttcccctaccccaccaaagccgagctctgctatttgactgtggtgaccaagtatccagaagaacagctcaagatctggttcacagcccaaaggctgaagcaggggatcagctggtcccctgaggagattgaggatgcccggaaaaagatgttcaatacagtcatccagtctgtgcctcagcccacaattacggttctaaataccccactcgtcgccagtgctggcaatgtccagcatctcatccaggccgctcttccaggtcacgttgtggggcagccagagggtacaggagggggacttctggtcactcagccattgatggccaatgggttgcaagcaacaagttcccctctccccctcacggtgacatccgtccccaagcagccaggtgtggcacccattaacactgtgtgttcaaatacaacgtcagctgtgaaggtggtcaatgcggcccagtcgctcctcacggcctgccccagcataacctcccaagccttccttgatgctagcatctacaaaaataagaaatctcatgaacagctgtcagctctgaaagggagcttctgtcggaaccagttcccagggcagagcgaagttgaacatctcacaaaagtgacgggcctcagtaccagagaggtgcggaaatggttcagtgatcgtagataccactgccggaacttgaagggctccagagcgatgatacctggagatcacagttccatcatcattgactctgtgccagaggtgtccttctccccatcgtccaaggtccctgaggtaacctgcattccgacaacagccacactagcaacccacccttctgccaaacgacaatcttggcaccagactcctgacttcacaccaaccaaatacaaggagagagcccctgagcagctcagagccctggagagcagttttgcacaaaaccctcttcctcttgatgaggaactggaccgcctgagaagtgaaaccaaaatgacccgacgagaaattgatagctggttttcagagagacggaaaaaagtgaatgctgaggagaccaagaaggctgaggagaatgcctctcaggaggaagaggaggctgctgaggatgagggtggagaagaggatttggccagtgagctaagggtctctggtgaaaatggctctctggaaatgcccagcagccatatcttggcagagcgcaaagtcagccccattaaaatcaacctgaagaacctgagggtcactgaagccaatggcaggaacgagattccagggctgggtgcctgtgaccctgaggatgatgagtcaaacaaactggcagagcagctcccaggcaaagtgagctgcaaaaagactgcccagcagcggcacttgctgcggcagctctttgtccagacacagtggccaagcaaccaggactatgactccatcatggcccagacgggtctgccacggccagaggtggtgcgctggtttggagatagcaggtacgcactgaagaacggccaactcaaatggtacgaagactataagcgaggcaacttcccaccagggctactggtcattgcccctggcaaccgggagctcctgcaggactattacatgacacacaagatgctgtatgaagaggacctgcagaacctctgtgacaagacccagatgagctcccagcaggtcaagcagtggtttgctgagaaaatgggggaggagaccagagccgtggcagacacaggcagtgaggaccagggccctggtactggtgagctcacagcagttcacaaagggatgggtgacacctattcagaggtgtctgagaacagtgagtcgtgggagccccgtgtccctgaggccagctcagagccctttgacacatcgagtccccaggctggacgtcagctcggttcctggtcactgagttcccagcctctcccttccctccttaccctttgacatttgtgttctcattagagaccccatcagagggcagccagaagctcagaaacagactgaatttgatctgattaatgtgaaggactggccagtctgggaaaccgcctgccacgtggaagagccaaacccgactctctgctgccacatgccgttcccatgcccggctgctgggcacctgggagagcttccagaatcctcgcagacagcccagagcctgccgctaccctcggcctgcccaccaccaagcaagcagcaagcaagatggggttctcatcagttcttcctcccacaatgtaggacctttcctttaccttccaatggataaaatagttcagagttcatagtcatattcatagacacagaatcaagcttttaacatatacatccacctctatatgttaaataaaacatcagattatcaacactgtc

SEQ ID NO: 10120 - protein, 945 aa, Homo sapiens
MEAQPAETLPEGPQQDLPPEASAASSEAAQNPSSTDGSTLANGHRSTLDGYLYSCKYCDFRSHDMTQFVGHMNSEHTDFNKDPTFVCSGCSFLAKTPEGLSLHNATCHSGEASFVWNVAKPDNHVVVEQSIPESTSTPDLAGEPSAEGADGQAEIIITKTPIMKIMKGKAEAKKIHTLKENVPSQPVGEALPKLSTGEMEVREGDHSFINGAVPVSQASASSAKNPHAANGPLIGTVPVLPAGIAQFLSLQQQPPVHAQHHVHQPLPTAKALPKVMIPLSSIPTYNAAMDSNSFLKNSFHKFPYPTKAELCYLTVVTKYPEEQLKIWFTAQRLKQGISWSPEEIEDARKKMFNTVIQSVPQPTITVLNTPLVASAGNVQHLIQAALPGHVVGQPEGTGGGLLVTQPLMANGLQATSSPLPLTVTSVPKQPGVAPINTVCSNTTSAVKVVNAAQSLLTACPSITSQAFLDASIYKNKKSHEQLSALKGSFCRNQFPGQSEVEHLTKVTGLSTREVRKWFSDRRYHCRNLKGSRAMIPGDHSSIIIDSVPEVSFSPSSKVPEVTCIPTTATLATHPSAKRQSWHQTPDFTPTKYKERAPEQLRALESSFAQNPLPLDEELDRLRSETKMTRREIDSWFSERRKKVNAEETKKAEENASQEEEEAAEDEGGEEDLASELRVSGENGSLEMPSSHILAERKVSPIKINLKNLRVTEANGRNEIPGLGACDPEDDESNKLAEQLPGKVSCKKTAQQRHLLRQLFVQTQWPSNQDYDSIMAQTGLPRPEVVRWFGDSRYALKNGQLKWYEDYKRGNFPPGLLVIAPGNRELLQDYYMTHKMLYEEDLQNLCDKTQMSSQQVKQWFAEKMGEETRAVADTGSEDQGPGTGELTAVHKGMGDTYSEVSENSESWEPRVPEASSEPFDTSSPQAGRQLGSWSLSSQPLPSLLTL

SEQ ID NO: 10121 - DNA, 861 bp, Homo sapiens
gtgaaaagacctagatggtagaaggcaagcagtggaatgtgtctgggtatccgagaaatatacagaaagcacttaagagaacttaatcatttttttctccctttccttagattgaatagggaaaacctgctttctgcaaacaactgaaaaagctgcatttagaaactgtttctttggccctcatcgagaagctggaacttgtattgttaggccccttatgggacaagctctcaactgctgatcacccagtgattgtcaccatggccagcaagaggaaatccaccacaccatgcatgatcccagtgaagactgtggtgttgcaagatgccagcatggaggcccagcccgctgagaccttgcctgaaggaccccagcaggatctgcccccagaagcatctgctgccagcagtgaggcagcacagaaccccagcagtatcagagccctttgacacatcgagtccccaggctggacgtcagctcgaaacagactgaatttgatctgattaatgtgaaggactggccagtctgggaaaccgcctgccacgtggaagagccaaacccgactctctgctgccacatgccgttcccatgcccggctgctgggcacctgggagagcttccagaatcctcgcagacagcccagagcctgccgctaccctcggcctgcccaccaccaagcaagcagcaagcaagatggggttctcatcagttcttcctcccacaatgtaggacctttcctttaccttccaatggataaaatagttcagagttcatagtcatattcatagacacagaatcaagcttttaacatatacatccacctctatatgttaaataaaacatcagattatcaacactgtc

SEQ ID NO: 10122 - protein, 62 aa, Homo sapiens; identical to SEQ ID NO: 10110

SEQ ID NO: 10123 - DNA, 3477 bp, Homo sapiens
aagttctttccagctctggacaggaaaacatgaaaacagatgatcccaaggaggactgaaatgcaactgcagaagcaacatgtgaccttttagagatgcttgtgggactgcataaagtgaagagggaaactggaaaaaaacaatgaagctaatcccgaactcctggcctcaaatgatcttcctaccttggcttcccaaagtgctgggattacagacgtgagctgctgtgcctggccaagacttaattttgaatgacattgggactattgccaaaaatcaaatccatcttcatgttgtccacttctcagccttaattgaatagggaaaacctgctttctgcaaacaactgaaaaagctgcatttagaaactgtttctttggccctcatcgagaagctggaacttgtattgttaggccccttatgggacaagctctcaactgctgatcacccagtgattgtcaccatggccagcaagaggaaatccaccacaccatgcatgatcccagtgaagactgtggtgttgcaagatgccagcatggaggcccagcccgctgagaccttgcctgaaggaccccagcaggatctgcccccagaagcatctgctgccagcagtgaggcagcacagaaccccagcagtactgatggctctacactggccaatgggcatcggagcactttagatggctatttatattcctgtaaatactgcgatttcagatcccatgacatgacccaatttgtgggacatatgaactcagagcacacagactttaataaagacccaacctttgtatgcagtgggtgcagttttctggcaaaaacccctgaggggctttccttgcacaatgccacatgtcactccggggaagccagctttgtgtggaacgtggccaagccagacaatcatgtggttgtggagcagagcatccctgagagcaccagcactcctgacctagcgggtgagcccagtgctgaaggggctgatggacaggcagaaatcatcattaccaaaactccaatcatgaagataatgaaaggcaaagctgaagccaaaaaaattcatacactcaaggagaatgtccctagccagcctgtgggtgaggccttaccaaagctgtcgactggagaaatggaggtgagagagggggaccattccttcatcaatggggcagttccagtcagccaggcatctgccagctctgcaaaaaacccccatgccgccaacgggcccctgataggaacagtgccagttttgccagctggcatagcacagttcctctccctccagcagcagcccccagtgcatgcccaacaccatgtccaccagccactgcccacggccaaggcccttcccaaagtgatgatccccctgagcagcattccaacgtacaatgcagccatggactctaacagcttcctgaagaactccttccacaagttcccctaccccaccaaagccgagctctgctatttgactgtggtgaccaagtatccagaagaacagctcaagatctggttcacagcccaaaggctgaagcaggggatcagctggtcccctgaggagattgaggatgcccggaaaaagatgttcaatacagtcatccagtctgtgcctcagcccacaattacggttctaaataccccactcgtcgccagtgctggcaatgtccagcatctcatccaggccgctcttccaggtcacgttgtggggcagccagagggtacaggagggggacttctggtcactcagccattgatggccaatgggttgcaagcaacaagttcccctctccccctcacggtgacatccgtccccaagcagccaggtgtggcacccattaacactgtgtgttcaaatacaacgtcagctgtgaaggtggtcaatgcggcccagtcgctcctcacggcctgccccagcataacctcccaagccttccttgatgctagcatctacaaaaataagaaatctcatgaacagctgtcagctctgaaagggagcttctgtcggaaccagttcccagggcagagcgaagttgaacatctcacaaaagtgacgggcctcagtaccagagaggtgcggaaatggttcagtgatcgtagataccactgccggaacttgaagggctccagagcgatgatacctggagatcacagttccatcatcattgactctgtgccagaggtgtccttctccccatcgtccaaggtccctgaggtaacctgcattccgacaacagccacactagcaacccacccttctgccaaacgacaatcttggcaccagactcctgacttcacaccaaccaaatacaaggagagagcccctgagcagctcagagccctggagagcagttttgcacaaaaccctcttcctcttgatgaggaactggaccgcctgagaagtgaaaccaaaatgacccgacgagaaattgatagctggttttcagagagacggaaaaaagtgaatgctgaggagaccaagaaggctgaggagaatgcctctcaggaggaagaggaggctgctgaggatgagggtggagaagaggatttggccagtgagctaagggtctctggtgaaaatggctctctggaaatgcccagcagccatatcttggcagagcgcaaagtcagccccattaaaatcaacctgaagaacctgagggtcactgaagccaatggcaggaacgagattccagggctgggtgcctgtgaccctgaggatgatgagtcaaacaaactggcagagcagctcccaggcaaagtgagctgcaaaaagactgcccagcagcggcacttgctgcggcagctctttgtccagacacagtggccaagcaaccaggactatgactccatcatggcccagacgggtctgccacggccagaggtggtgcgctggtttggagatagcaggtacgcactgaagaacggccaactcaaatggtacgaagactataagcgaggcaacttcccaccagggctactggtcattgcccctggcaaccgggagctcctgcaggactattacatgacacacaagatgctgtatgaagaggacctgcagaacctctgtgacaagacccagatgagctcccagcagaaacagactgaatttgatctgattaatgtgaaggactggccagtctgggaaaccgcctgccacgtggaagagccaaacccgactctctgctgccacatgccgttcccatgcccggctgctgggcacctgggagagcttccagaatcctcgcagacagcccagagcctgccgctaccctcggcctgcccaccaccaagcaagcagcaagcaagatggggttctcatcagttcttcctcccacaatgtaggacctttcctttaccttccaatggataaaatagttcagagttcatagtcatattcatagacacagaatcaagcttttaacatatacatccacctctatatgttaaataaaacatcagattatcaacactgtc

SEQ ID NO: 10124 - protein, 969 aa, Homo sapiens
MASKRKSTTPCMIPVKTVVLQDASMEAQPAETLPEGPQQDLPPEASAASSEAAQNPSSTDGSTLANGHRSTLDGYLYSCKYCDFRSHDMTQFVGHMNSEHTDFNKDPTFVCSGCSFLAKTPEGLSLHNATCHSGEASFVWNVAKPDNHVVVEQSIPESTSTPDLAGEPSAEGADGQAEIIITKTPIMKIMKGKAEAKKIHTLKENVPSQPVGEALPKLSTGEMEVREGDHSFINGAVPVSQASASSAKNPHAANGPLIGTVPVLPAGIAQFLSLQQQPPVHAQHHVHQPLPTAKALPKVMIPLSSIPTYNAAMDSNSFLKNSFHKFPYPTKAELCYLTVVTKYPEEQLKIWFTAQRLKQGISWSPEEIEDARKKMFNTVIQSVPQPTITVLNTPLVASAGNVQHLIQAALPGHVVGQPEGTGGGLLVTQPLMANGLQATSSPLPLTVTSVPKQPGVAPINTVCSNTTSAVKVVNAAQSLLTACPSITSQAFLDASIYKNKKSHEQLSALKGSFCRNQFPGQSEVEHLTKVTGLSTREVRKWFSDRRYHCRNLKGSRAMIPGDHSSIIIDSVPEVSFSPSSKVPEVTCIPTTATLATHPSAKRQSWHQTPDFTPTKYKERAPEQLRALESSFAQNPLPLDEELDRLRSETKMTRREIDSWFSERRKKVNAEETKKAEENASQEEEEAAEDEGGEEDLASELRVSGENGSLEMPSSHILAERKVSPIKINLKNLRVTEANGRNEIPGLGACDPEDDESNKLAEQLPGKVSCKKTAQQRHLLRQLFVQTQWPSNQDYDSIMAQTGLPRPEVVRWFGDSRYALKNGQLKWYEDYKRGNFPPGLLVIAPGNRELLQDYYMTHKMLYEEDLQNLCDKTQMSSQQKQTEFDLINVKDWPVWETACHVEEPNPTLCCHMPFPCPAAGHLGELPESSQTAQSLPLPSACPPPSKQQARWGSHQFFLPQCRTFPLPSNG

SEQ ID NO: 10125 - DNA, 4145 bp, Homo sapiens
agccgtcaaaggcagcaaatagactgaatgaaagatgagcttctgcctttatatccttctctcctgctacccaactcattgtggtgaaggaaaaagaaaacgcgggtggagactgcactatatgcttaggactgaaatgcaactgcagaagcaacatgtgaccttttagagatgcttgtgggactgcataaagtgaagagggaaactggaaaaaaacaatgaacatttatcaccatccagccactgtagataaatttgattggctgtctccctgccttcccttcacacccagtaccttccctgcctgaaatcctcattgagggcaagaactttatccccaggatctaaaccagtgctggacaatagatgctcatcccttccataggaaacagggaatgtttgtttctgtcttctggtaggagaaggattggtcccacccccagctccagggatggatcttgattgtttaagcccagtcagtgattctaacccatggaccaagaccctgccttggagattggggaacaggtgttggaagggctctattttggcaaagaatggattatttatgtgagcatatttccgcaaagctaatcccgaactcctggcctcaaatgatcttcctaccttggcttcccaaagtgctgggattacagacgtgagctgctgtgcctggccaagacttaattttgaatgacattgggactattgccaaaaatcaaatccatcttcatgttgtccacttctcagccttaattgaatagggaaaacctgctttctgcaaacaactgaaaaagctgcatttagaaactgtttctttggccctcatcgagaagctggaacttgtattgttaggccccttatgggacaagctctcaactgctgatcacccagtgattgtcaccatggccagcaagaggaaatccaccacaccatgcatgatcccagtgaagactgtggtgttgcaagatgccagcatggaggcccagcccgctgagaccttgcctgaaggaccccagcaggatctgcccccagaagcatctgctgccagcagtgaggcagcacagaaccccagcagtactgatggctctacactggccaatgggcatcggagcactttagatggctatttatattcctgtaaatactgcgatttcagatcccatgacatgacccaatttgtgggacatatgaactcagagcacacagactttaataaagacccaacctttgtatgcagtgggtgcagttttctggcaaaaacccctgaggggctttccttgcacaatgccacatgtcactccggggaagccagctttgtgtggaacgtggccaagccagacaatcatgtggttgtggagcagagcatccctgagagcaccagcactcctgacctagcgggtgagcccagtgctgaaggggctgatggacaggcagaaatcatcattaccaaaactccaatcatgaagataatgaaaggcaaagctgaagccaaaaaaattcatacactcaaggagaatgtccctagccagcctgtgggtgaggccttaccaaagctgtcgactggagaaatggaggtgagagagggggaccattccttcatcaatggggcagttccagtcagccaggcatctgccagctctgcaaaaaacccccatgccgccaacgggcccctgataggaacagtgccagttttgccagctggcatagcacagttcctctccctccagcagcagcccccagtgcatgcccaacaccatgtccaccagccactgcccacggccaaggcccttcccaaagtgatgatccccctgagcagcattccaacgtacaatgcagccatggactctaacagcttcctgaagaactccttccacaagttcccctaccccaccaaagccgagctctgctatttgactgtggtgaccaagtatccagaagaacagctcaagatctggttcacagcccaaaggctgaagcaggggatcagctggtcccctgaggagattgaggatgcccggaaaaagatgttcaatacagtcatccagtctgtgcctcagcccacaattacggttctaaataccccactcgtcgccagtgctggcaatgtccagcatctcatccaggccgctcttccaggtcacgttgtggggcagccagagggtacaggagggggacttctggtcactcagccattgatggccaatgggttgcaagcaacaagttcccctctccccctcacggtgacatccgtccccaagcagccaggtgtggcacccattaacactgtgtgttcaaatacaacgtcagctgtgaaggtggtcaatgcggcccagtcgctcctcacggcctgccccagcataacctcccaagccttccttgatgctagcatctacaaaaataagaaatctcatgaacagctgtcagctctgaaagggagcttctgtcggaaccagttcccagggcagagcgaagttgaacatctcacaaaagtgacgggcctcagtaccagagaggtgcggaaatggttcagtgatcgtagataccactgccggaacttgaagggctccagagcgatgatacctggagatcacagttccatcatcattgactctgtgccagaggtgtccttctccccatcgtccaaggtccctgaggtaacctgcattccgacaacagccacactagcaacccacccttctgccaaacgacaatcttggcaccagactcctgacttcacaccaaccaaatacaaggagagagcccctgagcagctcagagccctggagagcagttttgcacaaaaccctcttcctcttgatgaggaactggaccgcctgagaagtgaaaccaaaatgacccgacgagaaattgatagctggttttcagagagacggaaaaaagtgaatgctgaggagaccaagaaggctgaggagaatgcctctcaggaggaagaggaggctgctgaggatgagggtggagaagaggatttggccagtgagctaagggtctctggtgaaaatggctctctggaaatgcccagcagccatatcttggcagagcgcaaagtcagccccattaaaatcaacctgaagaacctgagggtcactgaagccaatggcaggaacgagattccagggctgggtgcctgtgaccctgaggatgatgagtcaaacaaactggcagagcagctcccaggcaaagtgagctgcaaaaagactgcccagcagcggcacttgctgcggcagctctttgtccagacacagtggccaagcaaccaggactatgactccatcatggcccagacgggtctgccacggccagaggtggtgcgctggtttggagatagcaggtacgcactgaagaacggccaactcaaatggtacgaagactataagcgaggcaacttcccaccagggctactggtcattgcccctggcaaccgggagctcctgcaggactattacatgacacacaagatgctgtatgaagaggacctgcagaacctctgtgacaagacccagatgagctcccagcaggtcaagcagtggtttgctgagaaaatgggggaggagaccagagccgtggcagacacaggcagtgaggaccagggccctggtactggtgagctcacagcagttcacaaagggatgggtgacacctattcagaggtgtctgagaacagtgagtcgtgggagccccgtgtccctgaggccagctcagagccctttgacacatcgagtccccaggctggacgtcagctcgaaacagactgaatttgatctgattaatgtgaaggactggccagtctgggaaaccgcctgccacgtggaagagccaaacccgactctctgctgccacatgccgttcccatgcccggctgctgggcacctgggagagcttccagaatcctcgcagacagcccagagcctgccgctaccctcggcctgcccaccaccaagcaagcagcaagcaagatggggttctcatcagttcttcctcccacaatgtaggacctttcctttaccttccaatggataaaatagttcagagttcatagtcatattcatagacacagaatcaagcttttaacatatacatccacctctatatgttaaataaaacatcagattatcaacactgtc

SEQ ID NO: 10126 - protein, 956 aa, Homo sapiens; identical to SEQ ID NO: 1269

SEQ ID NO: 10127 - DNA, 3731 bp, Homo sapiens
gaaagatgagcttctgcctttatatccttctctcctgctacccaactcattgtggtgaaggaaaaagaaaacgcgggtggagactgcactatatgcttaggactgaaatgcaactgcagaagcaacatgtgaccttttagagatgcttgtgggactgcataaagtgaagagggaaactggaaaaaaacaatgaacatttatcaccatccagccactgtagataaatttgattggctgtctccctgccttcccttcacacccagtaccttccctgcctgaaatcctcattgagggcaagaactttatccccaggatctaaaccagtgctggacaatagatgctcaatgaggaaactgagacacagcttaagaattttgcccaaagctacaaagattgaatagggaaaacctgctttctgcaaacaactgaaaaagctgcatttagaaactgtttctttggccctcatcgagaagctggaacttgtattgttaggccccttatgggacaagctctcaactgctgatcacccagtgattgtcaccatggccagcaagaggaaatccaccacaccatgcatgatcccagtgaagactgtggtgttgcaagatgccagcatggaggcccagcccgctgagaccttgcctgaaggaccccagcaggatctgcccccagaagcatctgctgccagcagtgaggcagcacagaaccccagcagtactgatggctctacactggccaatgggcatcggagcactttagatggctatttatattcctgtaaatactgcgatttcagatcccatgacatgacccaatttgtgggacatatgaactcagagcacacagactttaataaagacccaacctttgtatgcagtgggtgcagttttctggcaaaaacccctgaggggctttccttgcacaatgccacatgtcactccggggaagccagctttgtgtggaacgtggccaagccagacaatcatgtggttgtggagcagagcatccctgagagcaccagcactcctgacctagcgggtgagcccagtgctgaaggggctgatggacaggcagaaatcatcattaccaaaactccaatcatgaagataatgaaaggcaaagctgaagccaaaaaaattcatacactcaaggagaatgtccctagccagcctgtgggtgaggccttaccaaagctgtcgactggagaaatggaggtgagagagggggaccattccttcatcaatggggcagttccagtcagccaggcatctgccagctctgcaaaaaacccccatgccgccaacgggcccctgataggaacagtgccagttttgccagctggcatagcacagttcctctccctccagcagcagcccccagtgcatgcccaacaccatgtccaccagccactgcccacggccaaggcccttcccaaagtgatgatccccctgagcagcattccaacgtacaatgcagccatggactctaacagcttcctgaagaactccttccacaagttcccctaccccaccaaagccgagctctgctatttgactgtggtgaccaagtatccagaagaacagctcaagatctggttcacagcccaaaggctgaagcaggggatcagctggtcccctgaggagattgaggatgcccggaaaaagatgttcaatacagtcatccagtctgtgcctcagcccacaattacggttctaaataccccactcgtcgccagtgctggcaatgtccagcatctcatccaggccgctcttccaggtcacgttgtggggcagccagagggtacaggagggggacttctggtcactcagccattgatggccaatgggttgcaagcaacaagttcccctctccccctcacggtgacatccgtccccaagcagccaggtgtggcacccattaacactgtgtgttcaaatacaacgtcagctgtgaaggtggtcaatgcggcccagtcgctcctcacggcctgccccagcataacctcccaagccttccttgatgctagcatctacaaaaataagaaatctcatgaacagctgtcagctctgaaagggagcttctgtcggaaccagttcccagggcagagcgaagttgaacatctcacaaaagtgacgggcctcagtaccagagaggtgcggaaatggttcagtgatcgtagataccactgccggaacttgaagggctccagagcgatgatacctggagatcacagttccatcatcattgactctgtgccagaggtgtccttctccccatcgtccaaggtccctgaggtaacctgcattccgacaacagccacactagcaacccacccttctgccaaacgacaatcttggcaccagactcctgacttcacaccaaccaaatacaaggagagagcccctgagcagctcagagccctggagagcagttttgcacaaaaccctcttcctcttgatgaggaactggaccgcctgagaagtgaaaccaaaatgacccgacgagaaattgatagctggttttcagagagacggaaaaaagtgaatgctgaggagaccaagaaggctgaggagaatgcctctcaggaggaagaggaggctgctgaggatgagggtggagaagaggatttggccagtgagctaagggtctctggtgaaaatggctctctggaaatgcccagcagccatatcttggcagagcgcaaagtcagccccattaaaatcaacctgaagaacctgagggtcactgaagccaatggcaggaacgagattccagggctgggtgcctgtgaccctgaggatgatgagtcaaacaaactggcagagcagctcccaggcaaagtgagctgcaaaaagactgcccagcagcggcacttgctgcggcagctctttgtccagacacagtggccaagcaaccaggactatgactccatcatggcccagacgggtctgccacggccagaggtggtgcgctggtttggagatagcaggtacgcactgaagaacggccaactcaaatggtacgaagactataagcgaggcaacttcccaccagggctactggtcattgcccctggcaaccgggagctcctgcaggactattacatgacacacaagatgctgtatgaagaggacctgcagaacctctgtgacaagacccagatgagctcccagcaggtcaagcagtggtttgctgagaaaatgggggaggagaccagagccgtggcagacacaggcagtgaggaccagggccctggtactggtgagctcacagcagttcacaaagggatgggtgacacctattcagaggtgtctgagaacagtgagtcgtgggagccccgtgtccctgaggccagctcagagccctttgacacatcgagtccccaggctggacgtcagctcggtaaggagtccacaggggccatggctatcctgtgtgggtaaggggaggaggcacttatggttgggcactgaatttactgcacaggggcatctgctgtctctaaggctgcctggcagcagcattaaccgcctggctgcttcagaggacaactagcagcagaagccataggaatataatatgataaacggttgagagctgttttttgtttcatgtgtttttaaaaacctgcgcaggggaaggaacatggtgaccctaaaggggtccaagcttttctagccatttcttagcaataggagaacaggtcaaaacatcctctgagtcgggcagat

SEQ ID NO: 10128 - protein, 44 aa, Homo sapiens
MSFCLYILLSCYPTHCGEGKRKRGWRLHYMLRTEMQLQKQHVTF

SEQ ID NO: 10129 - DNA, 3537 bp, Homo sapiens
gaatgaaagatgagcttctgcctttatatccttctctcctgctacccaactcattgtggtgaaggaaaaagaaaacgcgggtggagactgcactatatgcttaggactgaaatgcaactgcagaagcaacatgtgaccttttagagatgcttgtgggactgcataaagtgaagagggaaactggaaaaaaacaatgaaattgaatagggaaaacctgctttctgcaaacaactgaaaaagctgcatttagaaactgtttctttggccctcatcgagaagctggaacttgtattgttaggccccttatgggacaagctctcaactgctgatcacccagtgattgtcaccatggccagcaagaggaaatccaccacaccatgcatgatcccagtgaagactgtggtgttgcaagatgccagcatggaggcccagcccgctgagaccttgcctgaaggaccccagcaggatctgcccccagaagcatctgctgccagcagtgaggcagcacagaaccccagcagtactgatggctctacactggccaatgggcatcggagcactttagatggctatttatattcctgtaaatactgcgatttcagatcccatgacatgacccaatttgtgggacatatgaactcagagcacacagactttaataaagacccaacctttgtatgcagtgggtgcagttttctggcaaaaacccctgaggggctttccttgcacaatgccacatgtcactccggggaagccagctttgtgtggaacgtggccaagccagacaatcatgtggttgtggagcagagcatccctgagagcaccagcactcctgacctagcgggtgagcccagtgctgaaggggctgatggacaggcagaaatcatcattaccaaaactccaatcatgaagataatgaaaggcaaagctgaagccaaaaaaattcatacactcaaggagaatgtccctagccagcctgtgggtgaggccttaccaaagctgtcgactggagaaatggaggtgagagagggggaccattccttcatcaatggggcagttccagtcagccaggcatctgccagctctgcaaaaaacccccatgccgccaacgggcccctgataggaacagtgccagttttgccagctggcatagcacagttcctctccctccagcagcagcccccagtgcatgcccaacaccatgtccaccagccactgcccacggccaaggcccttcccaaagtgatgatccccctgagcagcattccaacgtacaatgcagccatggactctaacagcttcctgaagaactccttccacaagttcccctaccccaccaaagccgagctctgctatttgactgtggtgaccaagtatccagaagaacagctcaagatctggttcacagcccaaaggctgaagcaggggatcagctggtcccctgaggagattgaggatgcccggaaaaagatgttcaatacagtcatccagtctgtgcctcagcccacaattacggttctaaataccccactcgtcgccagtgctggcaatgtccagcatctcatccaggccgctcttccaggtcacgttgtggggcagccagagggtacaggagggggacttctggtcactcagccattgatggccaatgggttgcaagcaacaagttcccctctccccctcacggtgacatccgtccccaagcagccaggtgtggcacccattaacactgtgtgttcaaatacaacgtcagctgtgaaggtggtcaatgcggcccagtcgctcctcacggcctgccccagcataacctcccaagccttccttgatgctagcatctacaaaaataagaaatctcatgaacagctgtcagctctgaaagggagcttctgtcggaaccagttcccagggcagagcgaagttgaacatctcacaaaagtgacgggcctcagtaccagagaggtgcggaaatggttcagtgatcgtagataccactgccggaacttgaagggctccagagcgatgatacctggagatcacagttccatcatcattgactctgtgccagaggtgtccttctccccatcgtccaaggtccctgaggtaacctgcattccgacaacagccacactagcaacccacccttctgccaaacgacaatcttggcaccagactcctgacttcacaccaaccaaatacaaggagagagcccctgagcagctcagagccctggagagcagttttgcacaaaaccctcttcctcttgatgaggaactggaccgcctgagaagtgaaaccaaaatgacccgacgagaaattgatagctggttttcagagagacggaaaaaagtgaatgctgaggagaccaagaaggctgaggagaatgcctctcaggaggaagaggaggctgctgaggatgagggtggagaagaggatttggccagtgagctaagggtctctggtgaaaatggctctctggaaatgcccagcagccatatcttggcagagcgcaaagtcagccccattaaaatcaacctgaagaacctgagggtcactgaagccaatggcaggaacgagattccagggctgggtgcctgtgaccctgaggatgatgagtcaaacaaactggcagagcagctcccaggcaaagtgagctgcaaaaagactgcccagcagcggcacttgctgcggcagctctttgtccagacacagtggccaagcaaccaggactatgactccatcatggcccagacgggtctgccacggccagaggtggtgcgctggtttggagatagcaggtacgcactgaagaacggccaactcaaatggtacgaagactataagcgaggcaacttcccaccagggctactggtcattgcccctggcaaccgggagctcctgcaggactattacatgacacacaagatgctgtatgaagaggacctgcagaacctctgtgacaagacccagatgagctcccagcaggtcaagcagtggtttgctgagaaaatgggggaggagaccagagccgtggcagacacaggcagtgaggaccagggccctggtactggtgagctcacagcagttcacaaagggatgggtgacacctattcagaggtgtctgagaacagtgagtcgtgggagccccgtgtccctgaggccagctcagagccctttgacacatcgagtccccaggctggacgtcagctcggtaaggagtccacaggggccatggctatcctgtgtgggtaaggggaggaggcacttatggttgggcactgaatttactgcacaggggcatctgctgtctctaaggctgcctggcagcagcattaaccgcctggctgcttcagaggacaactagcagcagaagccataggaatataatatgataaacggttgagagctgttttttgtttcatgtgtttttaaaaacctgcgcaggggaaggaacatggtgaccctaaaggggtccaagcttttctagccatttcttagcaataggagaacaggtcaaaacatcctctgagtcgggcagat

SEQ ID NO: 10130 - protein, 44 aa, Homo sapiens; identical to SEQ ID NO: 10128

SEQ ID NO: 10131 - DNA, 3760 bp, Homo sapiens
aaatagactgaatgaaagatgagcttctgcctttatatccttctctcctgctacccaactcattgtggtgaaggaaaaagaaaacgcgggtggagactgcactatatgcttaggactgaaatgcaactgcagaagcaacatgtgaccttttagagatgcttgtgggactgcataaagtgaagagggaaactggaaaaaaacaatgaaatgaggaaactgagacacagcttaagaattttgcccaaagctacaaaggctaatcccgaactcctggcctcaaatgatcttcctaccttggcttcccaaagtgctgggattacagacgtgagctgctgtgcctggccaagacttaattttgaatgacattgggactattgccaaaaatcaaatccatcttcatgttgtccacttctcagccttaattgaatagggaaaacctgctttctgcaaacaactgaaaaagctgcatttagaaactgtttctttggccctcatcgagaagctggaacttgtattgttaggccccttatgggacaagctctcaactgctgatcacccagtgattgtcaccatggccagcaagaggaaatccaccacaccatgcatgatcccagtgaagactgtggtgttgcaagatgccagcatggaggcccagcccgctgagaccttgcctgaaggaccccagcaggatctgcccccagaagcatctgctgccagcagtgaggcagcacagaaccccagcagtactgatggctctacactggccaatgggcatcggagcactttagatggctatttatattcctgtaaatactgcgatttcagatcccatgacatgacccaatttgtgggacatatgaactcagagcacacagactttaataaagacccaacctttgtatgcagtgggtgcagttttctggcaaaaacccctgaggggctttccttgcacaatgccacatgtcactccggggaagccagctttgtgtggaacgtggccaagccagacaatcatgtggttgtggagcagagcatccctgagagcaccagcactcctgacctagcgggtgagcccagtgctgaaggggctgatggacaggcagaaatcatcattaccaaaactccaatcatgaagataatgaaaggcaaagctgaagccaaaaaaattcatacactcaaggagaatgtccctagccagcctgtgggtgaggccttaccaaagctgtcgactggagaaatggaggtgagagagggggaccattccttcatcaatggggcagttccagtcagccaggcatctgccagctctgcaaaaaacccccatgccgccaacgggcccctgataggaacagtgccagttttgccagctggcatagcacagttcctctccctccagcagcagcccccagtgcatgcccaacaccatgtccaccagccactgcccacggccaaggcccttcccaaagtgatgatccccctgagcagcattccaacgtacaatgcagccatggactctaacagcttcctgaagaactccttccacaagttcccctaccccaccaaagccgagctctgctatttgactgtggtgaccaagtatccagaagaacagctcaagatctggttcacagcccaaaggctgaagcaggggatcagctggtcccctgaggagattgaggatgcccggaaaaagatgttcaatacagtcatccagtctgtgcctcagcccacaattacggttctaaataccccactcgtcgccagtgctggcaatgtccagcatctcatccaggccgctcttccaggtcacgttgtggggcagccagagggtacaggagggggacttctggtcactcagccattgatggccaatgggttgcaagcaacaagttcccctctccccctcacggtgacatccgtccccaagcagccaggtgtggcacccattaacactgtgtgttcaaatacaacgtcagctgtgaaggtggtcaatgcggcccagtcgctcctcacggcctgccccagcataacctcccaagccttccttgatgctagcatctacaaaaataagaaatctcatgaacagctgtcagctctgaaagggagcttctgtcggaaccagttcccagggcagagcgaagttgaacatctcacaaaagtgacgggcctcagtaccagagaggtgcggaaatggttcagtgatcgtagataccactgccggaacttgaagggctccagagcgatgatacctggagatcacagttccatcatcattgactctgtgccagaggtgtccttctccccatcgtccaaggtccctgaggtaacctgcattccgacaacagccacactagcaacccacccttctgccaaacgacaatcttggcaccagactcctgacttcacaccaaccaaatacaaggagagagcccctgagcagctcagagccctggagagcagttttgcacaaaaccctcttcctcttgatgaggaactggaccgcctgagaagtgaaaccaaaatgacccgacgagaaattgatagctggttttcagagagacggaaaaaagtgaatgctgaggagaccaagaaggctgaggagaatgcctctcaggaggaagaggaggctgctgaggatgagggtggagaagaggatttggccagtgagctaagggtctctggtgaaaatggctctctggaaatgcccagcagccatatcttggcagagcgcaaagtcagccccattaaaatcaacctgaagaacctgagggtcactgaagccaatggcaggaacgagattccagggctgggtgcctgtgaccctgaggatgatgagtcaaacaaactggcagagcagctcccaggcaaagtgagctgcaaaaagactgcccagcagcggcacttgctgcggcagctctttgtccagacacagtggccaagcaaccaggactatgactccatcatggcccagacgggtctgccacggccagaggtggtgcgctggtttggagatagcaggtacgcactgaagaacggccaactcaaatggtacgaagactataagcgaggcaacttcccaccagggctactggtcattgcccctggcaaccgggagctcctgcaggactattacatgacacacaagatgctgtatgaagaggacctgcagaacctctgtgacaagacccagatgagctcccagcaggtcaagcagtggtttgctgagaaaatgggggaggagaccagagccgtggcagacacaggcagtgaggaccagggccctggtactggtgagctcacagcagttcacaaagggatgggtgacacctattcagaggtgtctgagaacagtgagtcgtgggagccccgtgtccctgaggccagctcagagccctttgacacatcgagtccccaggctggacgtcagctcggtaaggagtccacaggggccatggctatcctgtgtgggtaaggggaggaggcacttatggttgggcactgaatttactgcacaggggcatctgctgtctctaaggctgcctggcagcagcattaaccgcctggctgcttcagaggacaactagcagcagaagccataggaatataatatgataaacggttgagagctgttttttgtttcatgtgtttttaaaaacctgcgcaggggaaggaacatggtgaccctaaaggggtccaagcttttctagccatttcttagcaataggagaacaggtcaaaacatcctctgagtcgggcagat

SEQ ID NO: 10132 - protein, 51 aa, Homo sapiens
MRKLRHSLRILPKATKANPELLASNDLPTLASQSAGITDVSCCAWPRLNFE

SEQ ID NO: 10133 - DNA, 3594 bp, Homo sapiens
aaatagactgaatgaaagatgagcttctgcctttatatccttctctcctgctacccaactcattgtggtgaaggaaaaagaaaacgcgggtggagactgcactatatgcttaggactgaaatgcaactgcagaagcaacatgtgaccttttagagatgcttgtgggactgcataaagtgaagagggaaactggaaaaaaacaatgaaatgaggaaactgagacacagcttaagaattttgcccaaagctacaaagattgaatagggaaaacctgctttctgcaaacaactgaaaaagctgcatttagaaactgtttctttggccctcatcgagaagctggaacttgtattgttaggccccttatgggacaagctctcaactgctgatcacccagtgattgtcaccatggccagcaagaggaaatccaccacaccatgcatgatcccagtgaagactgtggtgttgcaagatgccagcatggaggcccagcccgctgagaccttgcctgaaggaccccagcaggatctgcccccagaagcatctgctgccagcagtgaggcagcacagaaccccagcagtactgatggctctacactggccaatgggcatcggagcactttagatggctatttatattcctgtaaatactgcgatttcagatcccatgacatgacccaatttgtgggacatatgaactcagagcacacagactttaataaagacccaacctttgtatgcagtgggtgcagttttctggcaaaaacccctgaggggctttccttgcacaatgccacatgtcactccggggaagccagctttgtgtggaacgtggccaagccagacaatcatgtggttgtggagcagagcatccctgagagcaccagcactcctgacctagcgggtgagcccagtgctgaaggggctgatggacaggcagaaatcatcattaccaaaactccaatcatgaagataatgaaaggcaaagctgaagccaaaaaaattcatacactcaaggagaatgtccctagccagcctgtgggtgaggccttaccaaagctgtcgactggagaaatggaggtgagagagggggaccattccttcatcaatggggcagttccagtcagccaggcatctgccagctctgcaaaaaacccccatgccgccaacgggcccctgataggaacagtgccagttttgccagctggcatagcacagttcctctccctccagcagcagcccccagtgcatgcccaacaccatgtccaccagccactgcccacggccaaggcccttcccaaagtgatgatccccctgagcagcattccaacgtacaatgcagccatggactctaacagcttcctgaagaactccttccacaagttcccctaccccaccaaagccgagctctgctatttgactgtggtgaccaagtatccagaagaacagctcaagatctggttcacagcccaaaggctgaagcaggggatcagctggtcccctgaggagattgaggatgcccggaaaaagatgttcaatacagtcatccagtctgtgcctcagcccacaattacggttctaaataccccactcgtcgccagtgctggcaatgtccagcatctcatccaggccgctcttccaggtcacgttgtggggcagccagagggtacaggagggggacttctggtcactcagccattgatggccaatgggttgcaagcaacaagttcccctctccccctcacggtgacatccgtccccaagcagccaggtgtggcacccattaacactgtgtgttcaaatacaacgtcagctgtgaaggtggtcaatgcggcccagtcgctcctcacggcctgccccagcataacctcccaagccttccttgatgctagcatctacaaaaataagaaatctcatgaacagctgtcagctctgaaagggagcttctgtcggaaccagttcccagggcagagcgaagttgaacatctcacaaaagtgacgggcctcagtaccagagaggtgcggaaatggttcagtgatcgtagataccactgccggaacttgaagggctccagagcgatgatacctggagatcacagttccatcatcattgactctgtgccagaggtgtccttctccccatcgtccaaggtccctgaggtaacctgcattccgacaacagccacactagcaacccacccttctgccaaacgacaatcttggcaccagactcctgacttcacaccaaccaaatacaaggagagagcccctgagcagctcagagccctggagagcagttttgcacaaaaccctcttcctcttgatgaggaactggaccgcctgagaagtgaaaccaaaatgacccgacgagaaattgatagctggttttcagagagacggaaaaaagtgaatgctgaggagaccaagaaggctgaggagaatgcctctcaggaggaagaggaggctgctgaggatgagggtggagaagaggatttggccagtgagctaagggtctctggtgaaaatggctctctggaaatgcccagcagccatatcttggcagagcgcaaagtcagccccattaaaatcaacctgaagaacctgagggtcactgaagccaatggcaggaacgagattccagggctgggtgcctgtgaccctgaggatgatgagtcaaacaaactggcagagcagctcccaggcaaagtgagctgcaaaaagactgcccagcagcggcacttgctgcggcagctctttgtccagacacagtggccaagcaaccaggactatgactccatcatggcccagacgggtctgccacggccagaggtggtgcgctggtttggagatagcaggtacgcactgaagaacggccaactcaaatggtacgaagactataagcgaggcaacttcccaccagggctactggtcattgcccctggcaaccgggagctcctgcaggactattacatgacacacaagatgctgtatgaagaggacctgcagaacctctgtgacaagacccagatgagctcccagcaggtcaagcagtggtttgctgagaaaatgggggaggagaccagagccgtggcagacacaggcagtgaggaccagggccctggtactggtgagctcacagcagttcacaaagggatgggtgacacctattcagaggtgtctgagaacagtgagtcgtgggagccccgtgtccctgaggccagctcagagccctttgacacatcgagtccccaggctggacgtcagctcggtaaggagtccacaggggccatggctatcctgtgtgggtaaggggaggaggcacttatggttgggcactgaatttactgcacaggggcatctgctgtctctaaggctgcctggcagcagcattaaccgcctggctgcttcagaggacaactagcagcagaagccataggaatataatatgataaacggttgagagctgttttttgtttcatgtgtttttaaaaacctgcgcaggggaaggaacatggtgaccctaaaggggtccaagcttttctagccatttcttagcaataggagaacaggtcaaaacatcctctgagtcgggcagat

SEQ ID NO: 10134 - protein, 44 aa, Homo sapiens; identical to SEQ ID NO: 10128

SEQ ID NO: 10135 - DNA, 3893 bp, Homo sapiens
gtgctgaattgtgatagccgtcaaaggcagcaaatagactgaatgaaagatgagcttctgcctttatatccttctctcctgctacccaactcattgtggtgaaggaaaaagaaaacgcgggtggagactgcactatatgcttaggactgaaatgcaactgcagaagcaacatgtgaccttttagagatgcttgtgggactgcataaagtgaagagggaaactggaaaaaaacaatgaacatttatcaccatccagccactgtagataaatttgattggctgtctccctgccttcccttcacacccagtaccttccctgcctgaaatcctcattgagggcaagaactttatccccaggatctaaaccagtgctggacaatagatgctcagctaatcccgaactcctggcctcaaatgatcttcctaccttggcttcccaaagtgctgggattacagacgtgagctgctgtgcctggccaagacttaattttgaatgacattgggactattgccaaaaatcaaatccatcttcatgttgtccacttctcagccttaattgaatagggaaaacctgctttctgcaaacaactgaaaaagctgcatttagaaactgtttctttggccctcatcgagaagctggaacttgtattgttaggccccttatgggacaagctctcaactgctgatcacccagtgattgtcaccatggccagcaagaggaaatccaccacaccatgcatgatcccagtgaagactgtggtgttgcaagatgccagcatggaggcccagcccgctgagaccttgcctgaaggaccccagcaggatctgcccccagaagcatctgctgccagcagtgaggcagcacagaaccccagcagtactgatggctctacactggccaatgggcatcggagcactttagatggctatttatattcctgtaaatactgcgatttcagatcccatgacatgacccaatttgtgggacatatgaactcagagcacacagactttaataaagacccaacctttgtatgcagtgggtgcagttttctggcaaaaacccctgaggggctttccttgcacaatgccacatgtcactccggggaagccagctttgtgtggaacgtggccaagccagacaatcatgtggttgtggagcagagcatccctgagagcaccagcactcctgacctagcgggtgagcccagtgctgaaggggctgatggacaggcagaaatcatcattaccaaaactccaatcatgaagataatgaaaggcaaagctgaagccaaaaaaattcatacactcaaggagaatgtccctagccagcctgtgggtgaggccttaccaaagctgtcgactggagaaatggaggtgagagagggggaccattccttcatcaatggggcagttccagtcagccaggcatctgccagctctgcaaaaaacccccatgccgccaacgggcccctgataggaacagtgccagttttgccagctggcatagcacagttcctctccctccagcagcagcccccagtgcatgcccaacaccatgtccaccagccactgcccacggccaaggcccttcccaaagtgatgatccccctgagcagcattccaacgtacaatgcagccatggactctaacagcttcctgaagaactccttccacaagttcccctaccccaccaaagccgagctctgctatttgactgtggtgaccaagtatccagaagaacagctcaagatctggttcacagcccaaaggctgaagcaggggatcagctggtcccctgaggagattgaggatgcccggaaaaagatgttcaatacagtcatccagtctgtgcctcagcccacaattacggttctaaataccccactcgtcgccagtgctggcaatgtccagcatctcatccaggccgctcttccaggtcacgttgtggggcagccagagggtacaggagggggacttctggtcactcagccattgatggccaatgggttgcaagcaacaagttcccctctccccctcacggtgacatccgtccccaagcagccaggtgtggcacccattaacactgtgtgttcaaatacaacgtcagctgtgaaggtggtcaatgcggcccagtcgctcctcacggcctgccccagcataacctcccaagccttccttgatgctagcatctacaaaaataagaaatctcatgaacagctgtcagctctgaaagggagcttctgtcggaaccagttcccagggcagagcgaagttgaacatctcacaaaagtgacgggcctcagtaccagagaggtgcggaaatggttcagtgatcgtagataccactgccggaacttgaagggctccagagcgatgatacctggagatcacagttccatcatcattgactctgtgccagaggtgtccttctccccatcgtccaaggtccctgaggtaacctgcattccgacaacagccacactagcaacccacccttctgccaaacgacaatcttggcaccagactcctgacttcacaccaaccaaatacaaggagagagcccctgagcagctcagagccctggagagcagttttgcacaaaaccctcttcctcttgatgaggaactggaccgcctgagaagtgaaaccaaaatgacccgacgagaaattgatagctggttttcagagagacggaaaaaagtgaatgctgaggagaccaagaaggctgaggagaatgcctctcaggaggaagaggaggctgctgaggatgagggtggagaagaggatttggccagtgagctaagggtctctggtgaaaatggctctctggaaatgcccagcagccatatcttggcagagcgcaaagtcagccccattaaaatcaacctgaagaacctgagggtcactgaagccaatggcaggaacgagattccagggctgggtgcctgtgaccctgaggatgatgagtcaaacaaactggcagagcagctcccaggcaaagtgagctgcaaaaagactgcccagcagcggcacttgctgcggcagctctttgtccagacacagtggccaagcaaccaggactatgactccatcatggcccagacgggtctgccacggccagaggtggtgcgctggtttggagatagcaggtacgcactgaagaacggccaactcaaatggtacgaagactataagcgaggcaacttcccaccagggctactggtcattgcccctggcaaccgggagctcctgcaggactattacatgacacacaagatgctgtatgaagaggacctgcagaacctctgtgacaagacccagatgagctcccagcaggtcaagcagtggtttgctgagaaaatgggggaggagaccagagccgtggcagacacaggcagtgaggaccagggccctggtactggtgagctcacagcagttcacaaagggatgggtgacacctattcagaggtgtctgagaacagtgagtcgtgggagccccgtgtccctgaggccagctcagagccctttgacacatcgagtccccaggctggacgtcagctcggtaaggagtccacaggggccatggctatcctgtgtgggtaaggggaggaggcacttatggttgggcactgaatttactgcacaggggcatctgctgtctctaaggctgcctggcagcagcattaaccgcctggctgcttcagaggacaactagcagcagaagccataggaatataatatgataaacggttgagagctgttttttgtttcatgtgtttttaaaaacctgcgcaggggaaggaacatggtgaccctaaaggggtccaagcttttctagccatttcttagcaataggagaacaggtcaaaacatcctctgagtcgggcagat

SEQ ID NO: 10136 - protein, 44 aa, Homo sapiens; identical to SEQ ID NO: 10128

SEQ ID NO: 10137 - DNA, 3849 bp, Homo sapiens
attcttgtgtgctgaattgtgatagccgtcaaaggcagcaaatagactgaatgaaagatgagcttctgcctttatatccttctctcctgctacccaactcattgtggtgaaggaaaaagaaaacgcgggtggagactgcactatatgcttaggactgaaatgcaactgcagaagcaacatgtgaccttttagagatgcttgtgggactgcataaagtgaagagggaaactggaaaaaaacaatgaaatgaggaaactgagacacagcttaagaattttgcccaaagctacaaagtcccttccataggaaacagggaatgtttgtttctgtcttctggtaggagaaggattggtcccacccccagctccagggatggatcttgattgtttaagcccagtcagtgattctaacccatggaccaagaccctgccttggagattggggaacaggtgttggaagggctctattttggcaaagaatggattatttatgtgagcatatttccgcaaaattgaatagggaaaacctgctttctgcaaacaactgaaaaagctgcatttagaaactgtttctttggccctcatcgagaagctggaacttgtattgttaggccccttatgggacaagctctcaactgctgatcacccagtgattgtcaccatggccagcaagaggaaatccaccacaccatgcatgatcccagtgaagactgtggtgttgcaagatgccagcatggaggcccagcccgctgagaccttgcctgaaggaccccagcaggatctgcccccagaagcatctgctgccagcagtgaggcagcacagaaccccagcagtactgatggctctacactggccaatgggcatcggagcactttagatggctatttatattcctgtaaatactgcgatttcagatcccatgacatgacccaatttgtgggacatatgaactcagagcacacagactttaataaagacccaacctttgtatgcagtgggtgcagttttctggcaaaaacccctgaggggctttccttgcacaatgccacatgtcactccggggaagccagctttgtgtggaacgtggccaagccagacaatcatgtggttgtggagcagagcatccctgagagcaccagcactcctgacctagcgggtgagcccagtgctgaaggggctgatggacaggcagaaatcatcattaccaaaactccaatcatgaagataatgaaaggcaaagctgaagccaaaaaaattcatacactcaaggagaatgtccctagccagcctgtgggtgaggccttaccaaagctgtcgactggagaaatggaggtgagagagggggaccattccttcatcaatggggcagttccagtcagccaggcatctgccagctctgcaaaaaacccccatgccgccaacgggcccctgataggaacagtgccagttttgccagctggcatagcacagttcctctccctccagcagcagcccccagtgcatgcccaacaccatgtccaccagccactgcccacggccaaggcccttcccaaagtgatgatccccctgagcagcattccaacgtacaatgcagccatggactctaacagcttcctgaagaactccttccacaagttcccctaccccaccaaagccgagctctgctatttgactgtggtgaccaagtatccagaagaacagctcaagatctggttcacagcccaaaggctgaagcaggggatcagctggtcccctgaggagattgaggatgcccggaaaaagatgttcaatacagtcatccagtctgtgcctcagcccacaattacggttctaaataccccactcgtcgccagtgctggcaatgtccagcatctcatccaggccgctcttccaggtcacgttgtggggcagccagagggtacaggagggggacttctggtcactcagccattgatggccaatgggttgcaagcaacaagttcccctctccccctcacggtgacatccgtccccaagcagccaggtgtggcacccattaacactgtgtgttcaaatacaacgtcagctgtgaaggtggtcaatgcggcccagtcgctcctcacggcctgccccagcataacctcccaagccttccttgatgctagcatctacaaaaataagaaatctcatgaacagctgtcagctctgaaagggagcttctgtcggaaccagttcccagggcagagcgaagttgaacatctcacaaaagtgacgggcctcagtaccagagaggtgcggaaatggttcagtgatcgtagataccactgccggaacttgaagggctccagagcgatgatacctggagatcacagttccatcatcattgactctgtgccagaggtgtccttctccccatcgtccaaggtccctgaggtaacctgcattccgacaacagccacactagcaacccacccttctgccaaacgacaatcttggcaccagactcctgacttcacaccaaccaaatacaaggagagagcccctgagcagctcagagccctggagagcagttttgcacaaaaccctcttcctcttgatgaggaactggaccgcctgagaagtgaaaccaaaatgacccgacgagaaattgatagctggttttcagagagacggaaaaaagtgaatgctgaggagaccaagaaggctgaggagaatgcctctcaggaggaagaggaggctgctgaggatgagggtggagaagaggatttggccagtgagctaagggtctctggtgaaaatggctctctggaaatgcccagcagccatatcttggcagagcgcaaagtcagccccattaaaatcaacctgaagaacctgagggtcactgaagccaatggcaggaacgagattccagggctgggtgcctgtgaccctgaggatgatgagtcaaacaaactggcagagcagctcccaggcaaagtgagctgcaaaaagactgcccagcagcggcacttgctgcggcagctctttgtccagacacagtggccaagcaaccaggactatgactccatcatggcccagacgggtctgccacggccagaggtggtgcgctggtttggagatagcaggtacgcactgaagaacggccaactcaaatggtacgaagactataagcgaggcaacttcccaccagggctactggtcattgcccctggcaaccgggagctcctgcaggactattacatgacacacaagatgctgtatgaagaggacctgcagaacctctgtgacaagacccagatgagctcccagcaggtcaagcagtggtttgctgagaaaatgggggaggagaccagagccgtggcagacacaggcagtgaggaccagggccctggtactggtgagctcacagcagttcacaaagggatgggtgacacctattcagaggtgtctgagaacagtgagtcgtgggagccccgtgtccctgaggccagctcagagccctttgacacatcgagtccccaggctggacgtcagctcggtaaggagtccacaggggccatggctatcctgtgtgggtaaggggaggaggcacttatggttgggcactgaatttactgcacaggggcatctgctgtctctaaggctgcctggcagcagcattaaccgcctggctgcttcagaggacaactagcagcagaagccataggaatataatatgataaacggttgagagctgttttttgtttcatgtgtttttaaaaacctgcgcaggggaaggaacatggtgaccctaaaggggtccaagcttttctagccatttcttagcaataggagaacaggtcaaaacatcctctgagtcgggcagat

SEQ ID NO: 10138 - protein, 44 aa, Homo sapiens; identical to SEQ ID NO: 10128

SEQ ID NO: 10139 - DNA, 3854 bp, Homo sapiens
gagcactaacattcttgtgtgctgaattgtgatagccgtcaaaggcagcaaatagactgaatgaaagatgagcttctgcctttatatccttctctcctgctacccaactcattgtggtgaaggaaaaagaaaacgcgggtggagactgcactatatgcttaggactgaaatgcaactgcagaagcaacatgtgaccttttagagatgcttgtgggactgcataaagtgaagagggaaactggaaaaaaacaatgaacatttatcaccatccagccactgtagataaatttgattggctgtctccctgccttcccttcacacccagtaccttccctgcctgaaatcctcattgagggcaagaactttatccccaggatctaaaccagtgctggacaatagatgctcatgattctaacccatggaccaagaccctgccttggagattggggaacaggtgttggaagggctctattttggcaaagaatggattatttatgtgagcatatttccgcaaaattgaatagggaaaacctgctttctgcaaacaactgaaaaagctgcatttagaaactgtttctttggccctcatcgagaagctggaacttgtattgttaggccccttatgggacaagctctcaactgctgatcacccagtgattgtcaccatggccagcaagaggaaatccaccacaccatgcatgatcccagtgaagactgtggtgttgcaagatgccagcatggaggcccagcccgctgagaccttgcctgaaggaccccagcaggatctgcccccagaagcatctgctgccagcagtgaggcagcacagaaccccagcagtactgatggctctacactggccaatgggcatcggagcactttagatggctatttatattcctgtaaatactgcgatttcagatcccatgacatgacccaatttgtgggacatatgaactcagagcacacagactttaataaagacccaacctttgtatgcagtgggtgcagttttctggcaaaaacccctgaggggctttccttgcacaatgccacatgtcactccggggaagccagctttgtgtggaacgtggccaagccagacaatcatgtggttgtggagcagagcatccctgagagcaccagcactcctgacctagcgggtgagcccagtgctgaaggggctgatggacaggcagaaatcatcattaccaaaactccaatcatgaagataatgaaaggcaaagctgaagccaaaaaaattcatacactcaaggagaatgtccctagccagcctgtgggtgaggccttaccaaagctgtcgactggagaaatggaggtgagagagggggaccattccttcatcaatggggcagttccagtcagccaggcatctgccagctctgcaaaaaacccccatgccgccaacgggcccctgataggaacagtgccagttttgccagctggcatagcacagttcctctccctccagcagcagcccccagtgcatgcccaacaccatgtccaccagccactgcccacggccaaggcccttcccaaagtgatgatccccctgagcagcattccaacgtacaatgcagccatggactctaacagcttcctgaagaactccttccacaagttcccctaccccaccaaagccgagctctgctatttgactgtggtgaccaagtatccagaagaacagctcaagatctggttcacagcccaaaggctgaagcaggggatcagctggtcccctgaggagattgaggatgcccggaaaaagatgttcaatacagtcatccagtctgtgcctcagcccacaattacggttctaaataccccactcgtcgccagtgctggcaatgtccagcatctcatccaggccgctcttccaggtcacgttgtggggcagccagagggtacaggagggggacttctggtcactcagccattgatggccaatgggttgcaagcaacaagttcccctctccccctcacggtgacatccgtccccaagcagccaggtgtggcacccattaacactgtgtgttcaaatacaacgtcagctgtgaaggtggtcaatgcggcccagtcgctcctcacggcctgccccagcataacctcccaagccttccttgatgctagcatctacaaaaataagaaatctcatgaacagctgtcagctctgaaagggagcttctgtcggaaccagttcccagggcagagcgaagttgaacatctcacaaaagtgacgggcctcagtaccagagaggtgcggaaatggttcagtgatcgtagataccactgccggaacttgaagggctccagagcgatgatacctggagatcacagttccatcatcattgactctgtgccagaggtgtccttctccccatcgtccaaggtccctgaggtaacctgcattccgacaacagccacactagcaacccacccttctgccaaacgacaatcttggcaccagactcctgacttcacaccaaccaaatacaaggagagagcccctgagcagctcagagccctggagagcagttttgcacaaaaccctcttcctcttgatgaggaactggaccgcctgagaagtgaaaccaaaatgacccgacgagaaattgatagctggttttcagagagacggaaaaaagtgaatgctgaggagaccaagaaggctgaggagaatgcctctcaggaggaagaggaggctgctgaggatgagggtggagaagaggatttggccagtgagctaagggtctctggtgaaaatggctctctggaaatgcccagcagccatatcttggcagagcgcaaagtcagccccattaaaatcaacctgaagaacctgagggtcactgaagccaatggcaggaacgagattccagggctgggtgcctgtgaccctgaggatgatgagtcaaacaaactggcagagcagctcccaggcaaagtgagctgcaaaaagactgcccagcagcggcacttgctgcggcagctctttgtccagacacagtggccaagcaaccaggactatgactccatcatggcccagacgggtctgccacggccagaggtggtgcgctggtttggagatagcaggtacgcactgaagaacggccaactcaaatggtacgaagactataagcgaggcaacttcccaccagggctactggtcattgcccctggcaaccgggagctcctgcaggactattacatgacacacaagatgctgtatgaagaggacctgcagaacctctgtgacaagacccagatgagctcccagcaggtcaagcagtggtttgctgagaaaatgggggaggagaccagagccgtggcagacacaggcagtgaggaccagggccctggtactggtgagctcacagcagttcacaaagggatgggtgacacctattcagaggtgtctgagaacagtgagtcgtgggagccccgtgtccctgaggccagctcagagccctttgacacatcgagtccccaggctggacgtcagctcggtaaggagtccacaggggccatggctatcctgtgtgggtaaggggaggaggcacttatggttgggcactgaatttactgcacaggggcatctgctgtctctaaggctgcctggcagcagcattaaccgcctggctgcttcagaggacaactagcagcagaagccataggaatataatatgataaacggttgagagctgttttttgtttcatgtgtttttaaaaacctgcgcaggggaaggaacatggtgaccctaaaggggtccaagcttttctagccatttcttagcaataggagaacaggtcaaaacatcctctgagtcgggcagat

SEQ ID NO: 10140 - protein, 50 aa, Homo sapiens
MLMILTHGPRPCLGDWGTGVGRALFWQRMDYLCEHISAKLNRENLLSANN

SEQ ID NO: 10141 - DNA, 529 bp, Homo sapiens
agctctggacaggaaaacatgaaaacagatgatcccaaggaggtttctccctaaactaacaattaaagaatatagttttactttttcatttttatttgttgaaactggactgaaatgcaactgcagaagcaacatgtgaccttttagagatgcttgtgggactgcataaagtgaagagggaaactggaaaaaaacaatgaacatttatcaccatccagccactgtagataaatttgattggctgtctccctgccttcccttcacacccagtaccttccctgcctgaaatcctcattgagggcaagaactttatccccaggatctaaaccagtgctggacaatagatgctcatcccttccataggaaacagggaatgtttgtttctgtcttctggtaggagaaggattggtcccacccccagctccagggatggatcttgattgtttaagcccagtcagtgattctaacccatggaccaagaccctgccttggagattggggaacaggtgttggaagggctctattttgg

SEQ ID NO: 10142 - protein, 36 aa, Homo sapiens
MIPRRFLPKLTIKEYSFTFSFLFVETGLKCNCRSNM

SEQ ID NO: 10143 - DNA, 545 bp, Homo sapiens
gtgctttgtacattgggaagttctttccagctctggacaggaaaacatgaaaacagatgatcccaaggaggtttctccctaaactaacaattaaagaatatagttttactttttcatttttatttgttgaaactggtaaagcttctaccttgagtgggtctgggttgttttaaaatttatcagaccacattggtctgatattgtttccttcatttaatttgaaaaagcttgtttaaaataactatttggagatggaataattttttggttttatgaaaatttaaaggaattgtaaaagaatctaagacatacttatggaattgcagtcaagtttttctggtgattttgactgaaatgcaactgcagaagcaacatgtgaccttttagagatgcttgtgggactgcataaagtgaagagggaaactggaaaaaaacaatgaacatttatcaccatccagccactgtagataaatttgattggctgtctccctgccttcccttcacacccagtaccttccctgcctgaaatcctcattgagggcaag

SEQ ID NO: 10144 - protein, 38 aa, Homo sapiens
MIPRRFLPKLTIKEYSFTFSFLFVETGKASTLSGSGLF

SEQ ID NO: 10145 - DNA, 5414 bp, Homo sapiens
gtagaaggagtggagccgtgctctcaccctgtcttagaggacccggaagcgccaagtgactgagggccgaagacactcacctgtggagcctgtgcacgtaggtagaggcggcggctctgagtccaggagctccagtgggcagctccccagcaccagccatgaactacgtggggcagctggcggagacggtgtttgggacggtgaaggagctgtaccggggcctgaacccagccacactgagcggcggcattgacgtgctggtggtgaagcaggtggacggctcgttccggtgctcacccttccacgtgcgttttggcaagctgggcgtcctgcggtcgcgggagaaggtggtagacattgagctcaatggggagcctgtggacttgcacatgaagcttggggacagcggggaggccttctttgttcaggagctggagagcgatgatgaacatgtgcctcccggcctgtgcacctcacccatcccttgggggggtctgtctggcttcccctcggactcccagctgggcactgccagtgagcctgagggcctcgtcatggcaggcacggcctccactgggcggaggaagaggcgtcgcaggaggaaacccaagcagaaagaggatgcagtggcaactgattctagtccagaggaactggaggcaggcgctgagacagtgtccagttggaagagaagtcttcactgcagcccaaagacatctacccctactcggatggcgagtggcccccccaggccagcctctcagcaggtgagctaacatcccctaagagcgactcggagctggaggtgcggaccccggagcccagtcccctaagagccgagtcccacatgcagtgggcctgggggaggctgcctaaggtggccagagctgagcggcccgagtcctcagtggtccttgaaggcagagctggggcaacctctcctcctcggggaggacccagcactccctctacctctgtggctggcggcgtggaccctttgggactcccaatccagcaaacagaggctggtgccgaccttcagcctgacacagaggatcccactctagtgggtccccctctccacaccccagagacagaggaaagcaagactcagagctctggggacatgggcctccctcctgcctccaagtcatggagctgggccactctggaggttccagttcccaccgggcagccagagagggtctccagggggaaaggctccccaaagagaagccagcacctgggccccagtgacatctacctggatgacttgccctccctggactctgagaatgcagcgctttacttcccccaaagtgactctgggctgggggccagaagatggagtgaacccagcagtcagaagtccctgagggaccccaaccctgaacatgaacctgaacccactctggacacagtggatacaatagcactgtccctctgtggtggactggctgacagccgggacatctccctaggtatgttcgaccatggccaagcccttttgagggctggtgctgagcccagaggatggggagggcagggaagactgtgagggtggggcagtagaggtgagaggctgggcttccctgcagctctctgccctgtgcagtccacactccgccagcaggggctggaccttcccaagtccccatgaagcaaaatgcttgacgctaagttgtgagttatcctgtgaatcctggggtgggaacaggtgtaaaaaccacaggtagggaggagcactgccaggttacaaagccaaccgacaggaggtgagcagcagagtggggagcaccagggggctggggcagcgggtcacatgggatgtgccagcctcacccctcactctgcctctgtgcccagagaaattcaaccagcacagcgtctcttaccaggacctcaccaaaaaccccggacttttggatgacccaaacctagtggtgaaaatcaatggaaagcattataactgggctgtggctgcccccatgatcctctccctgcaagccttccagaaaaacttgcccaagagcaccatggacaagctggagagggagaagatgccccggaagggtgggcgatggtggttttcctggcgacgcagggacttcctggccgaggagcgcagtgcccagaaggagaagactgcagccaaggagcagcagggggagaagacagaagtcctgagcagtgatgacgatgccccagacagccctgtgatcctggagatcccctccttgccaccctccactccaccctccactcctacctacaagaagtccctccgcctctcctccgatcagatccggcgcctgaacctgcaagaaggtgccaatgatgtggtcttcagcgtgaccactcagtaccagggcacctgccgctgcaaggccaccatctacctgtggaaatgggacgacaaggtggtcatctctgacatcgacggcaccatcaccaagtcagatgctctgggccatatcctgccccagctggggaaagactggacacaccagggcatcaccagtctctatcacaaaatccaactgtgagtgcctgggctggggctggggctgaggcgaggcccccagctctagagagggagtgacaggacaggacatcttggggaccagcagggcccacaaggcaggctgccagggcaggtgcctggagtgctgagacctctctattggcccgcagttctgggaaaggctcatcccctggggctgtgttctaggatcagggcccacctactggcctgcagccggaggggaggccctctccatcctggtccacccaggcctcaggactctgtgcaccgtccagctgagtccactgcctggccgttctcttcaagtcccctccctgcaaaggttggaacatcagagtcccacagttgggctgggcaggctaaagccagagaaacagatgggggctggctggtctctgatggctctatgccaccctgtcccccactctcagaaatgggtacaagttcctgtactgctcggcgcgggccattggcatggcggacctcaccaaggggtacctgcagtgggtgagcgaggggggctgtagcctccccaagggccccatccttctgtctcccagcagcctcttctctgccctccacaggtaaccacccctacacatacaagcccgtggccccctggtggggaaaggcaggcccactgccaggccagccttagcaggctggcattaagctctcaggtggcaaggagggtggggtcagaccccccatcacctgagcctgccatcccctctggcttcttccctactttggcccccttccctgctgtggttctggccaccccagagaggtgatcgagaagaaaccagaggtgttcaaggtcgcctgcctgagtgacatccagcagctgtttctgccccacggacagcccttctatgctgcctttgggaataggcccaatgatgtctttgcctaccggcaggtgggcctgcctgagtcacgcatcttcacagtcaacccccggggagagctcatccaggagctcataaagaaccacaaatccacgtatgagcggcttggtgaagtggtcgagctcctcttcccacctgtggcccgtggccccagcacagacctggccaaccctgaatacagtaacttctgctactggcgggagccactgcctgctgtggaccttgataccctggactgaacctgccctggctggctcctcctccctggcccggcccaggactggctaggtgtcctggggtataggagggtgggaattggagtgtcatggggcaaacccactgaaggggaaggaggaggctgcaggttggttggcagctagagagactcccccatcttccccgtcatatttttgccagctaagctgcagctgctccaggcgtcagtgtggcactgtcctggggcaattagcttgtcatctgggcccttgcagggttctttttttttttttttttttttttttcctgagacagggtcttgttctgttgcccaggctggagtgcagtggcatgatctctcggctcactgcaacctccgcctcccgggttcaagcgattcacctgcctcagcctcccaagtagctgggattacaggcgtgtaccaccacgcctggctaattttcgtgtttttagtagagatgggttttcaccacattggccaggctggtctcgaactcctgacctcaagtgatttgcccacctcggcctcccaaagtgctgggattacaggcatgagctaccatgccaggcctccttgcagggttttctatgcccttgatatctgtctccctgtcaacctgggaccttgctgtaagtcttgataggacagggagaagagggaggccctaccgaggctcgaggcttcagtgaagggtgacagcagtgggagtgtggtacagcctctggaaggacacagtgttctccccgccccttgtctgggagccaggactgtaccctccgaagccagacatcactgccaacatatcccccttgctggtgccctggcatctcagcacatgacacacacccacacctgcaggctgtggttccggcttggcctgctccccgtccggctgctgccgctgcctctctccagacctcgcttaaggacagtcccaaactcagctggggcaggtgttggcctgaaagtcctcccccagcctctgctggccagcttggtgctcacagctgctgggtaagctcttgcctaaggagctgtgggaagcagggctgatgccccagcaacctctcctcccactgtctttgaagaaagtagctttagaccggctaaaagctttaatccagagcctgccctactctgatagtaccagagtggagggcagaataccaaatgtccaggaaccaaaggcagggctgtggggacctgaagagcagcacagtggggcccgtgctgctgtgggggaaactgaggctgggagcctcagcagagaccggtgtcaagagtctctgggaactgcataggcctgaggaacatgcattttcaagttgtccattgatggtttcgtacctgaatttctcaccttttgtgaacatcttgggagggtgggggttttgcaggggtgttaaaagcaaggcttggagcccctttcctccagctggtggctccttctcagggcctggcctcattcaggccactttgtagagaaatgccctgacctcgcaggaaggatttccccacccccaagtggaaggaagaggacagtgtgggcaccagagggccctggaaacatcttaggggaaggaaaggaaaaggataaatttggagtggggggtctctaaacagattgcctggattccgttctttcctggggttctacagctgcctaagccctcaccttgggggaggatcaaagggaataaagagaactcttggctgagtc

SEQ ID NO: 10146 - protein, 236 aa, Homo sapiens
MQWAWGRLPKVARAERPESSVVLEGRAGATSPPRGGPSTPSTSVAGGVDPLGLPIQQTEAGADLQPDTEDPTLVGPPLHTPETEESKTQSSGDMGLPPASKSWSWATLEVPVPTGQPERVSRGKGSPKRSQHLGPSDIYLDDLPSLDSENAALYFPQSDSGLGARRWSEPSSQKSLRDPNPEHEPEPTLDTVDTIALSLCGGLADSRDISLGMFDHGQALLRAGAEPRGWGGQGRL

SEQ ID NO: 10147 - DNA, 577 bp, Homo sapiens
agaaggagtggagccgtgctctcaccctgtcttagaggacccggaagcgccaagtgactgagggccgaagacactcacctgtggagcctgtgcacgtaggtagaggcggcggctctgagtccaggagctccagtgggcagctccccagcaccagccatgaactacgtggggcagctggcggagacggtgtttgggacggtgaaggagctgtaccggggcctgaacccagccacactgagcggcggcattgacgtgctggtggtgaagcaggtggacggctcgttccggtgctcacccttccacgtgcgttttggcaagctgggcgtcctgcggtcgcgggagaaggtggtgagtgctcaggctggctgaggtggctactgcagagtgggctttttaagctggggcagccactacagtcccaggacaggacctggggcctcccttaggtggggatctgtcctctggacaggcttcccttcatttgtactttctttgaaggtttttgggttgatttgggggttttggtctgggagggttcacagttagtttctcatggaaacagaccagtagggctcat

SEQ ID NO: 10148 - protein, 70 aa, Homo sapiens [sequence omitted]

SEQ ID NO: 10149 - DNA, 4363 bp, Homo sapiens
cgaagacactcacctgtggagcctgtgcacgtaggtagaggcggcggctctgagtccaggagctccagtgggcagctccccagcaccagccatgaactacgtggggcagctggcggagacggtgtttgggacggtgaaggagctgtaccggggcctgaacccagccacactgagcggcggcattgacgtgctggtggtgaagcaggtggacggctcgttccggtgctcacccttccacgtgcgttttggcaagctgggcgtcctgcggtcgcgggagaaggtggtagacattgagctcaatggggagcctgtggacttgcacatgaagcttggggacagcggggaggccttctttgttcaggagctggagagcgatgatgaacatgtgcctcccggcctgtgcacctcacccatcccttgggggggtctgtctggcttcccctcggactcccagctgggcactgccagtgagcctgagggcctcgtcatggcaggcacggcctccactgggcggaggaagaggcgtcgcaggaggaaacccaagcagaaagaggatgcagtggcaactgattctagtccagaggaactggaggcaggcgctgagagtgagctatccctgccggaaaagctgaggccagagcccccaggtgtccagttggaagagaagtcttcactgcagcccaaagacatctacccctactcggatggcgagtggcccccccaggccagcctctcagcaggtgagctaacatcccctaagagcgactcggagctggaggtgcggaccccggagcccagtcccctaagagccgagtcccacatgcagtgggcctgggggaggctgcctaaggtggccagagctgagcggcccgagtcctcagtggtccttgaaggcagagctggggcaacctctcctcctcggggaggacccagcactccctctacctctgtggctggcggcgtggaccctttgggactcccaatccagcaaacagaggctggtgccgaccttcagcctgacacagaggatcccactctagtgggtccccctctccacaccccagagacagaggaaagcaagactcagagctctggggacatgggcctccctcctgcctccaagtcatggagctgggccactctggaggttccagttcccaccgggcagccagagagggtctccagggggaaaggctccccaaagagaagccagcacctgggccccagtgacatctacctggatgacttgccctccctggactctgagaatgcagcgctttacttcccccaaagtgactctgggctgggggccagaagatggagtgaacccagcagtcagaagtccctgagggaccccaaccctgaacatgaacctgaacccactctggacacagtggatacaatagcactgtccctctgtggtggactggctgacagccgggacatctccctagagaaattcaaccagcacagcgtctcttaccaggacctcaccaaaaaccccggacttttggatgacccaaacctagtggtgaaaatcaatggaaagcattataactgggctgtggctgcccccatgatcctctccctgcaagccttccagaaaaacttgcccaagagcaccatggacaagctggagagggagaagatgccccggaagggtgggcgatggtggttttcctggcgacgcagggacttcctggccgaggagcgcagtgcccagaaggagaagactgcagccaaggagcagcagggggagaagacagaagtcctgagcagtgatgacgatgccccagacagccctgtgatcctggagatcccctccttgccaccctccactccaccctccactcctacctacaagaagtccctccgcctctcctccgatcagatccggcgcctgaacctgcaagaaggtgccaatgatgtggtcttcagcgtgaccactcagtaccagggcacctgccgctgcaaggccaccatctacctgtggaaatgggacgacaaggtggtcatctctgacatcgacggcaccatcaccaagtcagatgctctgggccatatcctgccccagctggggaaagactggacacaccagggcatcaccagtctctatcacaaaatccaactaaatgggtacaagttcctgtactgctcggcgcgggccattggcatggcggacctcaccaaggggtacctgcagtgggtgagcgaggggggctgtagcctccccaagggccccatccttctgtctcccagcagcctcttctctgccctccacagagaggtgatcgagaagaaaccagaggtgttcaaggtcgcctgcctgagtgacatccagcagctgtttctgccccacggacagcccttctatgctgcctttgggaataggcccaatgatgtctttgcctaccggcaggtgggcctgcctgagtcacgcatcttcacagtcaacccccggggagagctcatccaggagctcataaagaaccacaaatccacgtatgagcggcttggtgaagtggtcgagctcctcttcccacctgtggcccgtggccccagcacagacctggccaaccctgaatacagtaacttctgctactggcgggagccactgcctgctgtggaccttgataccctggactgaacctgccctggctggctcctcctccctggcccggcccaggactggctaggtgtcctggggtataggagggtgggaattggagtgtcatggggcaaacccactgaaggggaaggaggaggctgcaggttggttggcagctagagagactcccccatcttccccgtcatatttttgccagctaagctgcagctgctccaggcgtcagtgtggcactgtcctggggcaattagcttgtcatctgggcccttgcagggttctttttttttttttttttttttttttcctgagacagggtcttgttctgttgcccaggctggagtgcagtggcatgatctctcggctcactgcaacctccgcctcccgggttcaagcgattcacctgcctcagcctcccaagtagctgggattacaggcgtgtaccaccacgcctggctaattttcgtgtttttagtagagatgggttttcaccacattggccaggctggtctcgaactcctgacctcaagtgatttgcccacctcggcctcccaaagtgctgggattacaggcatgagctaccatgccaggcctccttgcagggttttctatgcccttgatatctgtctccctgtcaacctgggaccttgctgtaagtcttgataggacagggagaagagggaggccctaccgaggctcgaggcttcagtgaagggtgacagcagtgggagtgtggtacagcctctggaaggacacagtgttctccccgccccttgtctgggagccaggactgtaccctccgaagccagacatcactgccaacatatcccccttgctggtgccctggcatctcagcacatgacacacacccacacctgcaggctgtggttccggcttggcctgctccccgtccggctgctgccgctgcctctctccagacctcgcttaaggacagtcccaaactcagctggggcaggtgttggcctgaaagtcctcccccagcctctgctggccagcttggtgctcacagctgctgggtaagctcttgcctaaggagctgtgggaagcagggctgatgccccagcaacctctcctcccactgtctttgaagaaagtagctttagaccggctaaaagctttaatccagagcctgccctactctgatagtaccagagtggagggcagaataccaaatgtccaggaaccaaaggcagggctgtggggacctgaagagcagcacagtggggcccgtgctgctgtgggggaaactgaggctgggagcctcagcagagaccggtgtcaagagtctctgggaactgcataggcctgaggaacatgcattttcaagttgtccattgatggtttcgtacctgaatttctcaccttttgtgaacatcttgggagggtgggggttttgcaggggtgttaaaagcaaggcttggagcccctttcctccagctggtggctccttctcagggcctggcctcattcaggccactttgtagagaaatgccctgacctcgcaggaaggatttccccacccccaagtggaaggaagaggacagtgtgggcaccagagggccctggaaacatcttaggggaaggaaaggaaaaggataaatttggagtggggggtctctaaacagattgcctggattccgttctttcctggggttctacagctgcctaagccctcaccttgggggaggatcaaagggaataaagagaactcttggctga

SEQ ID NO: 10150 - protein, 851 aa, Homo sapiens; identical to SEQ ID NO: 1271

SEQ ID NO: 10151 - DNA, 567 bp, Homo sapiens
ccgctgcaaggccaccatctacctgtggaaatgggacgacaaggtggtcatctctgacatcgacggcaccatcaccaagtcagatgctctgggccatatcctgccccagctggggaaagactggacacaccagggcatcaccagtctctatcacaaaatccaactaaatgggtacaagttcctgtactgctcggcgcgggccattggcatggcggacctcaccaaggggtacctgcagtggagaggtgatcgagaagaaaccagaggtgttcaaggtcgcctgcctgagtgacatccagcagctgtttctgccccacggacagcccttctatgctgcctttgggaataggcccaatgatgtctttgcctaccggcaggtgggcctgcctgagtcacgcatcttcacagtcaacccccggggagagctcatccaggagctcataaagaaccacaaatccacgtatgagcggcttggtgaagtggtcgagctcctcttcccacctgtggcccgtggccccagcacagacctggccaaccctgaatacagtaacttctgctactggcggg

SEQ ID NO: 10152 - protein, 132 aa, Homo sapiens
MGTSSCTARRGPLAWRTSPRGTCSGEVIEKKPEVFKVACLSDIQQLFLPHGQPFYAAFGNRPNDVFAYRQVGLPESRIFTVNPRGELIQELIKNHKSTYERLGEVVELLFPPVARGPSTDLANPEYSNFCYW

SEQ ID NO: 10153 - DNA, 1762 bp, Homo sapiens
cctgagacagggtcttgttctgttgcccaggctggagtgcagtggcatgatctctcggctcactgcaacctccgcctcccgggttcaagcgattcacctgcctcagcctcccaagtagctgggattacaggcgtgtaccaccacgcctggctaattttcgtgtttttagtagagatgggttttcaccacattggccaggctggtctcgaactcctgacctcaagtgatttgcccacctcggcctcccaaagtgctgggattacaggcatgagctaccatgccaggcctccttgcagggttttctatgcccttgatatctgtctccctgtcaacctgggaccttgctgtaagtcttgataggacagggagaagagggaggccctaccgaggctcgaggcttcagtgaagggtgacagcagtgggagtgtggtacagcctctggaaggacacagtgttctccccgccccttgtctgggagccaggactgtaccctccgaagccagacatcactgccaacatatcccccttgctggtgccctggcatctcagcacatgacacacacccacacctgcaggctgtggttccggcttggcctgctccccgtccggctgctgccgctgcctctctccagacctcgcttaaggacagtcccaaactcagctggggcaggtgttggcctgaaagtcctcccccagcctctgctggccagcttggtgctcacagctgctgggtaagctcttgcctaaggagctgtgggaagcagggctgatgccccagcaacctctcctcccactgtctttgaagaaagtagctttagaccggctaaaagctttaatccagagcctgccctactctgatagtaccagagtggagggcagaataccaaatgtccaggaaccaaaggcagggctgtggggacctgaagagcagcacagtggggcccgtgctgctgtgggggaaactgaggctgggagcctcagcagagaccggtgtcaagagtctctgggaactgcataggcctgaggatcaaagggaataaagagaactcttggctgagtctttgtgcttctgttctgtcctgaaggacacgtgaggagccagaaacatctggcagcctctggtccttagttcagatacaacatccatgaagctgccaggtgtgaggagagttccagtgggcatcaccttcctgcacaaacctagtcctgatggctgcgaagagaagccgaggggacaaggaacagaagccaccaagggctgtggactgttgcttgtgggcacagggcaatgcggacaggccactggctgtgggcctgtaggtctctgcacagttgctgaggctggtgctgactgcctgcagggtcctctcaaggccttacatacggacactgatcaaggccagtttgccacagcagctgcccctgccagccatgctcaggccctgcagctggctgtccagacactgatttgctgacagtggaatgtgaactctctcaagtctaccctggccttcaagcatgacatccttgccttgaccgctgtccggaactgtccagtttctgcagcactgtgcatgggttttggtggctgggacagccacgtggaggattccctcagtggcctccttagtgccatttgggctagccagggaaggctggaaggcgctgctggataaggctgggctctggggtgatgttccccgagttggtgggatctaggggttgggtcctggccagcctgtctagttggcttgccctggcc

SEQ ID NO: 10154 - protein, 50 aa, Homo sapiens
MSRNQRQGCGDLKSSTVGPVLLWGKLRLGASAETGVKSLWELHRPEDQRE

SEQ ID NO: 10155 - DNA, 3854 bp, Homo sapiens
atgggccgccgccgcctgctcgtctggctgtgcgccgtcgcggcgctgctctcgggggcgcaggccaggggcaccccgctcctggcgcggcctgcgccgcccggtgcctcccgctacagtctctacacgacgggatggcgcccgcggctgcgcccggggccgcacaaggccctctgtgcctatgtggtgcacaggaatgtgacctgcatcctacaggagggagcggagagctacgtaaaggctgaataccggcagtgtagatgggggcccaagtgccccgggacagtcacgtaccgcacagtactcagacccaaatacaaggttggccctgctggaggagtacgtggaccgacggctgcaccgactctgggggagcctgctggatggctttgagcagaagctgcaaggcgtccagagtgagtgtgacctgcgggtgcaggaggtacggcggcaatgtgaggagggtcaggccgccagccggaggctgcaccagagccttgatggccgggagctggccctgcgccaggagctgtcacagctgggcagccagctgcagggcctgagcgtgtctggcaggggcagctgctgtgggcaactagccttgatcaatgcccgtatggatggccttgagagggccctgcaggcagtcaccgagacccaaaggggccccggtgccccggccggggatgagcttacgaggctctctgctgccatgctcgagggaggtgtggacgggctgcttgagggtctggagacgctcaatgggacagagggtggagcaaggggatgctgtctgaggttggacatgggggggtggggagtgggcggctttgggaccatgctggaagagcgcgtgcagagcctcgaggagcgcctagcaacattggctggggagctaagccatgacagcgcctctccgggcaggtcagctcggccccttgtacagacagagctggctgtgctagagcaacggttggtctcactggagacttcgtgcaccccgagcaccacctcagccatcctggacagcctcgtggcagaggtgaaggcctggcagagccggagcgaggccctcctacgccaggtggccagccacgcagcactgctccagcagctcaatggcactgtggccgaggtccagggacagctggcagaagggacgggcagctcacttcaaggcgagatcactctgctcaaggtcaatctgaactcagtgagcaagtcgctcacaggcctcagtgactctgtcagccagtactctgatgccttcttggctgccaacacgtccctggatgagcgggaacgcaaggtggaagccgaagtccaggccatccaggagcaggtcagcagccaaggctccaggcttcaggctggccacaggcaggtcctgaacctgcgtggggagctggagcaactcaaggctggtgtggccaaggtggccagtgggctgagccgctgccaggacacagcccagaaacttcagcacacagtgggacactttgaccagcgggtggcacaagtggagggtgcgtgcaggaggctgggcctgctggccgcgggcctggacagcttgcccactgagccactgaggcccagagagggcctgtggagccatgtggaccagctgaatcgtacgctggcccagcacacgcaggacattgcccgcctccgggatgacctactggactgccaggcccagctggctgagcaggtgcggccagggcaagccaactagacaggctggccaggacccaacccctagatcccaccaactcggggaacatcaccccagagcccagccttatccagcagcgccttccagccttccctggctagcccaaatggcactaaggaggccactgagggaatcctccacgtggctgtcccagccaccaaaacccatgcacagtgctgcagaaactggacagttccggacagcggtcaaggcaaggatgtcatgcttgaaggccagggtagacttgagagagttcacattccactgtcagcaaatcagtgtctggacagccagctgcagggcctgagcatggctggcaggggcagctgctgtggcaaactggccttgatcagtgtccgtatgtaaggccttgagaggaccctgcaggcagtcagcaccagcctcagcaactgtgcagagacctacaggcccacagccagtggcctgtccgcattgccctgtgcccacaagcaacagtccacagcccttggtggcttctgttccttgtcccctcggcttctcttcgcagccatcaggactaggtttgtgcaggaaggtgatgcccactggaactctcctcacacctggcagcttcatggatgttgtatctgaactaaggaccagaggctgccagatgtttctggctcctcacgtgtccttcaggacagaacagaagcacaaagactcagccaagagttctctttattccctttgatcctcccccaaggtgagggcttaggcagctgtagaaccccaggaaagaacggaatccaggcaatctgtttagagaccccccactccaaatttatccttttcctttccttcccctaagatgtttccagggccctctggtgcccacactgtcctcttccttccacttgggggtggggaaatccttcctgcgaggtcagggcatttctctacaaagtggcctgaatgaggccaggccctgagaaggagccaccagctggaggaaaggggctccaagccttgcttttaacacccctgcaaaacccccaccctcccaagatgttcacaaaaggtgagaaattcaggtacgaaaccatcaatggacaacttgaaaatgcatgttcctcaggcctatgcagttcccagagactcttgacaccggtctctgctgaggctcccagcctcagtttcccccacagcagcacgggccccactgtgctgctcttcaggtccccacagccctgcctttggttcctggacatttggtattctgccctccactctggtactatcagagtagggcaggctctggattaaagcttttagccggtctaaagctactttcttcaaagacagtgggaggagaggttgctggggcatcagccctgcttcccacagctccttaggcaagagcttacccagcagctgtgagcaccaagctggccagcagaggctgggggaggactttcaggccaacacctgccccagctgagtttgggactgtccttaagcgaggtctggagagaggcagcggcagcagccggacggggagcaggccaagccggaaccacagcctgcaggtgtgggtgtgtgtcatgtgctgagatgccagggcaccagcaagggggatatgttggcagtgatgtctggcttcggagggtacagtcctggctcccagacaaggggcggggagaacactgtgtccttccagaggctgtaccacactcccactgctgtcacccttcactgaagcctcgagcctcggtagggcctccctcttctccctgtcctatcaagacttacagcaaggtcccaggttgacagggagacagatatcaagggcatagaaaaccctgcaaggaggcctggcatggtagctcatgcctgtaatcccagcactttgggaggccgaggtgggcaaatcacttgaggtcaggagttcgagaccagcctggccaatgtggtgaaaacccatctctactaaaaacacgaaaattagccaggcgtggtggtacacgcctgtaatcccagctacttgggaggctgaggcaggtgaatcgcttgaacccgggaggcggaggttgcagtgagccgagagatcatgccactgcactccagcctgggcaacagaacaagaccctgtctcagg

SEQ ID NO: 10156 - protein, 130 aa, Homo sapiens
MGRRRLLVWLCAVAALLSGAQARGTPLLARPAPPGASRYSLYTTGWRPRLRPGPHKALCAYVVHRNVTCILQEGAESYVKAEYRQCRWGPKCPGTVTYRTVLRPKYKVGPAGGVRGPTAAPTLGEPAGWL

SEQ ID NO: 10157 - DNA, 4644 bp, Homo sapiens
cgcctcccctccgcggccccagccgctagcagcgccggccactccgcgggacgcagccgccgcgaagcgccaggcggccgggccagcgagctcgggggccgaaggggaccccgggaccctcggggcgggacccgggccgaccagcggcgggggcggcgcggcgctgcaggcggacacccggcggggggcaccgcgcggggccgggcagaggcgcgggggccgctatgggccgccgccgcctgctcgtctggctgtgcgccgtcgcggcgctgctctcgggggcgcaggccaggggcaccccgctcctggcgcggcctgcgccgcccggtgcctcccgctacagtctctacacgacgggatggcgcccgcggctgcgcccggggccgcacaaggccctctgtgcctatgtggtgcacaggaatgtgacctgcatcctacaggagggagcggagagctacgtaaaggctgaataccggcagtgtagatgggggcccaagtgccccgggacagtcacgtaccgcacagtactcagacccaaatacaaggttggctacaagacagtgacagacctcgcctggcgttgctgtcccggcttcactgggaaacgctgccctgagcacctcacggaccatggggctgcctcaccccagctggagcctgagcctcagattccttcagggcagctggacccaggccccaggcccccttcctacagcagagcagcccccagccctcatggaaggaaaggcccagggctgtttggtgagcggctggaacgcctggagggtgatgtccagcgcctggctcaaacatatggtaccctcagtggcctggtggctagccacgaggatcccaacaggatgactggtggccccagggctcctgctgtccctgtgggctttggggtcatccctgaggggcttgtgggcccaggagacagagccagagggccactaacacctcccttagacgagatcctaagcaaggtgacagaggtgagcaacactcttcagaccaaggtgcagcttctagacaaggtgcatgggctggcacttggccatgaggcccacctgcagcggctgcgggaagccccaccatccccgctcacctccctggccctgctggaggagtacgtggaccgacggctgcaccgactctgggggagcctgctggatggctttgagcagaagctgcaaggcgtccagagtgagtgtgacctgcgggtgcaggaggtacggcggcaatgtgaggagggtcaggccgccagccggaggctgcaccagagccttgatggccgggagctggccctgcgccaggagctgtcacagctgggcagccagctgcagggcctgagcgtgtctggcaggggcagctgctgtgggcaactagccttgatcaatgcccgtatggatggccttgagagggccctgcaggcagtcaccgagacccaaaggggccccggtgccccggccggggatgagcttacgaggctctctgctgccatgctcgagggaggtgtggacgggctgcttgagggtctggagacgctcaatgggacagagggtggagcaaggggatgctgtctgaggttggacatgggggggtggggagtgggcggctttgggaccatgctggaagagcgcgtgcagagcctcgaggagcgcctagcaacattggctggggagctaagccatgacagcgcctctccgggcaggtcagctcggccccttgtacagacagagctggctgtgctagagcaacggttggtctcactggagacttcgtgcaccccgagcaccacctcagccatcctggacagcctcgtggcagaggtgaaggcctggcagagccggagcgaggccctcctacgccaggtggccagccacgcagcactgctccagcagctcaatggcactgtggccgaggtccagggacagctggcagaagggacgggcagctcacttcaaggcgagatcactctgctcaaggtcaatctgaactcagtgagcaagtcgctcacaggcctcagtgactctgtcagccagtactctgatgccttcttggctgccaacacgtccctggatgagcgggaacgcaaggtggaagccgaagtccaggccatccaggagcaggtcagcagccaaggctccaggcttcaggctggccacaggcaggtcctgaacctgcgtggggagctggagcaactcaaggctggtgtggccaaggtggccagtgggctgagccgctgccaggacacagcccagaaacttcagcacacagtgggacactttgaccagcgggtggcacaagtggagggtgcgtgcaggaggctgggcctgctggccgcgggcctggacagcttgcccactgagccactgaggcccagagagggcctgtggagccatgtggaccagctgaatcgtacgctggcccagcacacgcaggacattgcccgcctccgggatgacctactggactgccaggcccagctggctgagcaggtgcggccagggcaagccaactagacaggctggccaggacccaacccctagatcccaccaactcggggaacatcaccccagagcccagccttatccagcagcgccttccagccttccctggctagcccaaatggcactaaggaggccactgagggaatcctccacgtggctgtcccagccaccaaaacccatgcacagtgctgcagaaactggacagttccggacagcggtcaaggcaaggatgtcatgcttgaaggccagggtagacttgagagagttcacattccactgtcagcaaatcagtgtctggacagccagctgcagggcctgagcatggctggcaggggcagctgctgtggcaaactggccttgatcagtgtccgtatgtaaggccttgagaggaccctgcaggcagtcagcaccagcctcagcaactgtgcagagacctacaggcccacagccagtggcctgtccgcattgccctgtgcccacaagcaacagtccacagcccttggtggcttctgttccttgtcccctcggcttctcttcgcagccatcaggactaggtttgtgcaggaaggtgatgcccactggaactctcctcacacctggcagcttcatggatgttgtatctgaactaaggaccagaggctgccagatgtttctggctcctcacgtgtccttcaggacagaacagaagcacaaagactcagccaagagttctctttattccctttgatcctcccccaaggtgagggcttaggcagctgtagaaccccaggaaagaacggaatccaggcaatctgtttagagaccccccactccaaatttatccttttcctttccttcccctaagatgtttccagggccctctggtgcccacactgtcctcttccttccacttgggggtggggaaatccttcctgcgaggtcagggcatttctctacaaagtggcctgaatgaggccaggccctgagaaggagccaccagctggaggaaaggggctccaagccttgcttttaacacccctgcaaaacccccaccctcccaagatgttcacaaaaggtgagaaattcaggtacgaaaccatcaatggacaacttgaaaatgcatgttcctcaggcctatgcagttcccagagactcttgacaccggtctctgctgaggctcccagcctcagtttcccccacagcagcacgggccccactgtgctgctcttcaggtccccacagccctgcctttggttcctggacatttggtattctgccctccactctggtactatcagagtagggcaggctctggattaaagcttttagccggtctaaagctactttcttcaaagacagtgggaggagaggttgctggggcatcagccctgcttcccacagctccttaggcaagagcttacccagcagctgtgagcaccaagctggccagcagaggctgggggaggactttcaggccaacacctgccccagctgagtttgggactgtccttaagcgaggtctggagagaggcagcggcagcagccggacggggagcaggccaagccggaaccacagcctgcaggtgtgggtgtgtgtcatgtgctgagatgccagggcaccagcaagggggatatgttggcagtgatgtctggcttcggagggtacagtcctggctcccagacaaggggcggggagaacactgtgtccttccagaggctgtaccacactcccactgctgtcacccttcactgaagcctcgagcctcggtagggcctccctcttctccctgtcctatcaagacttacagcaaggtcccaggttgacagggagacagatatcaagggcatagaaaaccctgcaaggaggcctggcatggtagctcatgcctgtaatcccagcactttgggaggccgaggtgggcaaatcacttgaggtcaggagttcgagaccagcctggccaatgtggtgaaaacccatctctactaaaaacacgaaaattagccaggcgtggtggtacacgcctgtaatcccagctacttgggaggctgaggcaggtgaatcgcttgaacccgggaggcggaggttgcagtgagccgagagatcatgccactgcactccagcctgggcaacagaacaagaccctgtctcagg

SEQ ID NO: 10158 - protein, 766 aa, Homo sapiens; identical to SEQ ID NO: 1273

SEQ ID NO: 10159 - DNA, 1619 bp, Homo sapiens
tcgaactcctgacctcaagtgatttgcccacctcggcctcccaaagtgctgggattacaggcatgagctaccatgccaggcctccttgcagggttttctatgcccttgatatctgtctccctgtcaacctgggaccttgctgtaagtcttgataggacagggagaagagggaggccctaccgaggctcgaggcttcagtgaagggtgacagcagtgggagtgtggtacagcctctggaaggacacagtgttctccccgccccttgtctgggagccaggactgtaccctccgaagccagacatcactgccaacatatcccccttgctggtgccctggcatctcagcacatgacacacacccacacctgcaggctgtggttccggcttggcctgctccccgtccggctgctgccgctgcctctctccagacctcgcttaaggacagtcccaaactcagctggggcaggtgttggcctgaaagtcctcccccagcctctgctggccagcttggtgctcacagctgctgggtaagctcttgcctaaggagctgtgggaagcagggctgatgccccagcaacctctcctcccactgtctttgaagaaagtagctttagaccggctaaaagctttaatccagagcctgccctactctgatagtaccagagtggagggcagaataccaaatgtccaggaaccaaaggcagggctgtggggacctgaagagcagcacagtggggcccgtgctgctgtgggggaaactgaggctgggagcctcagcagagaccggtgtcaagagtctctgggaactgcataggcctgaggaacatgcattttcaagttgtccattgatggtttcgtacctgaatttctcaccttgggggaggatcaaagggaataaagagaactcttggctgagtctttgtgcttctgttctgtcctgaaggacacgtgaggagccagaaacatctggcagcctctggtccttagttcagatacaacatccatgaagctgccaggtgtgaggagagttccagtgggcatcaccttcctgcacaaacctagtcctgatggctgcgaagagaagccgaggggacaaggaacagaagccaccaagggctgtggactgttgcttgtgggcacagggcaatgcggacaggccactggctgtgggcctgtaggtctctgcacagttgctgaggctggtgctgactgcctgcagggtcctctcaaggccttacatacggacactgatcaaggccagtttgccacagcagctgcccctgccagccatgctcaggccctgcagctggctgtccagacactgatttgctgacagtggaatgtgaactctctcaagtctaccctggccttcaagcatgacatccttgccttgaccgctgtccggaactgtccagtttctgcagcactgtgcatgggttttggtggctgggacagccacgtggaggattccctcagtggcctccttagtgccatttgggctagccagggaaggctggaaggcgctgctggataaggctgggctctggggtgatgttccccgagttggtgggatctaggggttgggtcctggccagcctgtctagttggcttgccctggcc

SEQ ID NO: 10160 - protein, 85 aa, Homo sapiens
MSRNQRQGCGDLKSSTVGPVLLWGKLRLGASAETGVKSLWELHRPEEHAFSSCPLMVSYLNFSPWGRIKGNKENSWLSLCASVLS

SEQ ID NO: 10161 - DNA, 3037 bp, Homo sapiens
atgggccgccgccgcctgctcgtctggctgtgcgccgtcgcggcgctgctctcgggggcgcaggccaggggcaccccgctcctggcgcggcctgcgccgcccggtgcctcccgctacagtctctacacgacgggatggcgcccgcggctgcgcccggggccgcacaaggccctctgtgcctatgtggtgcacaggaatgtgacctgcatcctacaggagggagcggagagctacgtaaaggctgaataccggcagtgtagatgggggcccaagtgccccgggacagtcacgtaccgcacagtactcagacccaaatacaaggttggccctgctggaggagtacgtggaccgacggctgcaccgactctgggggagcctgctggatggctttgagcagaagctgcaaggcgtccagagtgagtgtgacctgcgggtgcaggaggtacggcggcaatgtgaggagggtcaggccgccagccggaggctgcaccagagccttgatggccgggagctggccctgcgccaggagctgtcacagctgggcagccagctgcagggcctgagcgtgtctggcaggggcagctgctgtgggcaactagccttgatcaatgcccgtatggatggccttgagagggccctgcaggcagtcaccgagacccaaaggggccccggtgccccggccggggatgagcttacgaggctctctgctgccatgctcgagggaggtgtggacgggctgcttgagggtctggagacgctcaatgggacagagggtggagcaaggggatgctgtctgaggttggacatgggggggtggggagtgggcggctttgggaccatgctggaagagcgcgtgcagagcctcgaggagcgcctagcaacattggctggggagctaagccatgacagcgcctctccgggcaggtcagctcggccccttgtacagacagagctggctgtgctagagcaacggttggtctcactggagacttcgtgcaccccgagcaccacctcagccatcctggacagcctcgtggcagaggtgaaggcctggcagagccggagcgaggccctcctacgccaggtggccagccacgcagcactgctccagcagctcaatggcactgtggccgaggtccagggacagctggcagaagggacgggcagctcacttcaaggcgagatcactctgctcaaggtcaatctgaactcagtgagcaagtcgctcacaggcctcagtgactctgtcagccagtactctgatgccttcttggctgccaacacgtccctggatgagcgggaacgcaaggtggaagccgaagtccaggccatccaggagcaggtcagcagccaaggctccaggcttcaggctggccacaggcaggtcctgaacctgcgtggggagctggagcaactcaaggctggtgtggccaaggtggccagtgggctgagccgctgccaggacacagcccagaaacttcagcacacagtgggacactttgaccagcgggtggcacaagtggagggtgcgtgcaggaggctgggcctgctggccgcgggcctggacagcttgcccactgagccactgaggcccagagagggcctgtggagccatgtggaccagctgaatcgtacgctggcccagcacacgcaggacattgcccgcctccgggatgacctactggactgccaggcccagctggctgagcaggtgcggccagggcaagccaactagacaggctggccaggacccaacccctagatcccaccaactcggggaacatcaccccagagcccagccttatccagcagcgccttccagccttccctggctagcccaaatggcactaaggaggccactgagggaatcctccacgtggctgtcccagccaccaaaacccatgcacagtgctgcagaaactggacagttccggacagcggtcaaggcaaggatgtcatgcttgaaggccagggtagacttgagagagttcacattccactgtcagcaaatcagtgtctggacagccagctgcagggcctgagcatggctggcaggggcagctgctgtggcaaactggccttgatcagtgtccgtatgtaaggccttgagaggaccctgcaggcagtcagcaccagcctcagcaactgtgcagagacctacaggcccacagccagtggcctgtccgcattgccctgtgcccacaagcaacagtccacagcccttggtggcttctgttccttgtcccctcggcttctcttcgcagccatcaggactaggtttgtgcaggaaggtgatgcccactggaactctcctcacacctggcagcttcatggatgttgtatctgaactaaggaccagaggctgccagatgtttctggctcctcacgtgtccttcaggacagaacagaagcacaaagactcagccaagagttctctttattccctttgatcctcccccaaggtgagggcttaggcagctgtagaaccccaggaaagaacggaatccaggcaatctgtttagagaccccccactccaaatttatccttttcctttccttcccctaagatgtttccagggccctctggtgcccacactgtcctcttccttccacttgggggtggggaaatccttcctgcgaggtcagggcatttctctacaaagtggcctgaatgaggccaggccctgagaaggagccaccagctggaggaaaggggctccaagccttgcttttaacacccctgcaaaacccccaccctcccaagatgttcacaaaaggtgagaaattcaggtacgaaaccatcaatggacaacttgaaaatgcatgttcctcaggcctatgcagttcccagagactcttgacaccggtctctgctgaggctcccagcctcagtttcccccacagcagcacgggccccactgtgctgctcttcaggtccccacagccctgcctttggttcctggacatttggtattctgccctccactctggtactatcagagtagggcaggctctggattaaagcttttagccggtc

SEQ ID NO: 10162 - protein, 130 aa, Homo sapiens; identical to SEQ ID NO: 10156

SEQ ID NO: 10163 - DNA, 3827 bp, Homo sapiens; identical to SEQ ID NO: 1272

SEQ ID NO: 10164 - protein, 766 aa, Homo sapiens; identical to SEQ ID NO: 1273

SEQ ID NO: 10165 - DNA, 840 bp, Homo sapiens
ttactctagtcgtcatcttggtgagaatctagaatacctgggggggcagcatcttatagcactctgtatcttacacttatcacttccctccacccccacctcctttaaaaaaaaaacaaaattactacagaaatctgatattctaaggagaaggcatttgggcatttttatttcttctgttttatttttgtaaggaatgggacaacaaccagatccagcctttggtcgagtgtctagtcctcccaatgcaatgatgtcgtcaagaatgggtccctcccagaatcccatgatgcaacacccgcaggctgcatccatctatcagtcctcagaaatgaagggctggccatcaggaaatttggccaggaacagctccttttcccagcagcagtttgcccaccaggggaatcctgcagtgtatagtatggtgcacatgaatggcagcagtggtcacatgggacagatgaacatgaaccccatgcccatgtctggcatgcctatgggtcctgatcagaaatactgctgacatctctgcaccaggacctcttaaggaaaccactgtacaaatgacactgcactaggattattgggaaggaatcattgttccaggcatccatcttggaagaaaggaccagctttgagctccatcaagggtattttaagtgatgtcatttgagcaggactggattttaagccgaagggcaatatctacgtgtttttcccccctccttctgctgtgtatcatggtgttcaaaacagaaatgttttttggcattccacctcctagggatataattctggagacatggagtgttactgatcataaaacttttgtgtcacttt

SEQ ID NO: 10166 - protein, 108 aa, Homo sapiens [sequence omitted]

SEQ ID NO: 10167 - DNA, 3982 bp, Homo sapiens
ttactctagtcgtcatcttggtgagaatctagaatacctgggggggcagcatcttatagcactctgtatcttacacttatcacttccctccacccccacctcctttaaaaaaaaaacaaaattactacagaaatctgatattctaaggagaaggcatttgggcatttttatttcttctgttttatttttgtaaggaatgggacaacaaccagatccagcctttggtcgagtgtctagtcctcccaatgcaatgatgtcgtcaagaatgggtccctcccagaatcccatgatgcaacacccgcaggctgcatccatctatcagtcctcagaaatgaagggctggccatcaggaaatttggccaggaacagctccttttcccagcagcagtttgcccaccaggggaatcctgcagtgtatagtatggtgcacatgaatggcagcagtggtcacatgggacagatgaacatgaaccccatgcccatgtctggcatgcctatgggtcctgatcagaaatactgctgacatctctgcaccaggacctcttaaggaaaccactgtacaaatgacactgcactaggattattgggaaggaatcattgttccaggcatccatcttggaagaaaggaccagctttgagctccatcaagggtattttaagtgatgtcatttgagcaggactggattttaagccgaagggcaatatctacgtgtttttcccccctccttctgctgtgtatcatggtgttcaaaacagaaatgttttttggcattccacctcctagggatataattctggagacatggagtgttactgatcataaaacttttgtgtcacttttttctgccttgctagccaaaatctcttaaatacacgtaggtgggccagagaacattggaagaatcaagagagattagaatatctggtttctctagttgcagtattggacaaagagcatagtcccagccttcaggtgtagtagttctgtgttgaccctttgtccagtggaattggtgattctgaattgtcctttactaatggtgttgagttgctctgtccctattatttgccctaggctttctcctaatgaaggttttcatttgccattcatgtcctgtaatacttcacctccaggaactgtcatggatgtccaaatggctttgcagaaaggaaatgagatgacagtatttaatcgcagcagtagcaaacttttcacatgctaatgtgcagctgagtgcactttatttaaaaagaatggataaatgcaatattcttgaggtcttgagggaatagtgaaacacattcctggtttttgcctacacttacgtgttagacaagaactatgatttttttttttaaagtactggtgtcaccctttgcctatatggtagagcaataatgctttttaaaaataaacttctgaaaacccaaggccaggtactgcattctgaatcagaatctcgcagtgtttctgtgaatagatttttttgtaaatatgacctttaagatattgtattatgtaaaatatgtatatacctttttttgtaggtcacaacaactcatttttacagagtttgtgaagctaaatatttaacattgttgatttcagtaagctgtgtggtgaggctaccagtggaagagacatcccttgacttttgtggcctgggggaggggtagtgctccacagcttttccttccccaccccccagccttagatgcctcgctcttttcaatctcttaatctaaatgctttttaaagagattatttgtttagatgtaggcattttaattttttaaaaattcctctaccagaactaagcactttgttaatttggggggaaagaatagatatggggaaataaacttaaaaaaaaatcaggaatttaaaaaaacgagcaatttgaagagaatcttttggattttaagcagtccgaaataatagcaattcatgggctgtgtgtgtgtgtgtatgtgtgtgtgtgtgtgtgtatgtttaattatgttaccttttcatcccctttaggagcgttttcagattttggttgctaagacctgaatcccatattgagatctcgagtagaatccttggtgtggtttctggtgtctgctcagctgtcccctcattctactaatgtgatgctttcattatgtccctgtggattagaatagtgtcagttatttcttaagtaactcagtacccagaacagccagttttactgtgattcagagccacagtctaactgagcaccttttaaacccctccctcttctgccccctaccacttttctgctgttgcctctctttgacacctgttttagtcagttgggaggaagggaaaaatcaagtttaattccctttatctgggttaattcatttggttcaaatagttgacggaattgggtttctgaatgtctgtgaatttcagaggtctctgctagccttggtatcattttctagcaataactgagagccagttaattttaagaatttcacacatttagccaatctttctagatgtctctgaaggtaagatcatttaatatctttgatatgcttacgagtaagtgaatcctgattatttccagacccaccaccagagtggatcttattttcaaagcagtatagacaattatgagtttgccctctttcccctaccaagttcaaaatatatctaagaaagattgtaaatccgaaaacttccattgtagtggcctgtgcttttcagatagtatactctcctgtttggagacagaggaagaaccaggtcagtctgtctctttttcagctcaattgtatctgacccttctttaagttatgtgtgtggggagaaatagaatggtgctcttatctttcttgactttaaaaaaattattaaaaacaaaaaaaaaataaatttttttgcaatcctttcctcagacctggctccaggctaactggaaggcagcactcccttttttatatagtagaaaaatgaagtttattataagtttttatattttctacttgttcatttggtgcaaactcaagatttcttttaataggtgcagtctttgagataatttgtttttacctgtattgccctttatcttttttaggtaattctttgtactcctgctgtctacctctcctcacaccccagcaccccccattttttcaaaccttggtatctgttgggtgaacagtataatcttttcatctgcttttagaatgtgggatatttccagtacctactttttttttttttttttgctgaatccaaagatatataaataaaatatatatattttataaagatcagaatgatataaaggagatacatgtttcttcctttaaaaaataaacggaagttacattgttaatgttcatattatgatgccacttttctaaactgcatctggattgaaaggtgtaaatatcaataacagtgctacttagttatcagtatttaatatctgaggtgagttgggggtatctatattaggggtagggtattacagaagataattggcttgatgtcctagaagttctttgatccagaggtgggtgcagctgaaagtaaacagaatggattgccagttacatgtatgcctgcccagttccctttttatttgcagaagctgtgagttttgttcacaattaggttcctaggagcaaaacctcaaggattgatttattgttttcaactccaaggcacactgttaataaacgagcagggtgttttctctcttcctttctaatatatggagtttcgaagaataaaatatgagagcaatatttaaattctcaggaattgacttatactcttgagaatgaattcagtttcaatcaagtttacattatgttgcttaaaaaaatagaaattattctttatcttgcaaagaattgaaaccacatgaaatgacttatgggggatggtgagctgtgactgctttgctgaccattttggatgtcattgtaaataaaggtttctatttaaaattgg

SEQ ID NO: 10168 - protein, 108 aa, Homo sapiens [sequence omitted]

SEQ ID NO: 10169 - DNA, 4045 bp, Homo sapiens
ttactctagtcgtcatcttggtgagaatctagaatacctgggggggcagcatcttatagcactctgtatcttacacttatcacttccctccacccccacctcctttaaaaaaaaaacaaaattactacagaaatctgatattctaaggagaaggcatttgggcatttttatttcttctgttttatttttgtaaggaatgggacaacaaccagatccagcctttggtcgagtgtctagtcctcccaatgcaatgatgtcgtcaagaatgggtccctcccagaatcccatgatgcaacacccgcaggctgcatccatctatcagtcctcagaaatgaagggctggccatcaggaaatttggccaggaacagctccttttcccagcagcagtttgcccaccaggggaatcctgcagtgtatagtatggtgcacatgaatggcagcagtggtcacatgggacagatgaacatgaaccccatgcccatgtctggcatgcctatgggtcctgatcagaaatactgctgacatctctgcaccaggacctcttaaggaaaccactgtacaaatgacactgcactaggattattgggaaggaatcattgttccaggcatccatcttggaagaaaggaccagctttgagctccatcaagggtattttaagtgatgtcatttgagcaggactggattttaagccgaagggcaatatctacgtgtttttcccccctccttctgctgtgtatcatggtgttcaaaacagaaatgttttttggcattccacctcctagggatataattctggagacatggagtgttactgatcataaaacttttgtgtcacttttttctgccttgctagccaaaatctcttaaatacacgtaggtgggccagagaacattggaagaatcaagagagattagaatatctggtttctctagttgcagtattggacaaagagcatagtcccagccttcaggtgtagtagttctgtgttgaccctttgtccagtggaattggtgattctgaattgtcctttactaatggtgttgagttgctctgtccctattatttgccctaggctttctcctaatgaaggttttcatttgccattcatgtcctgtaatacttcacctccaggaactgtcatggatgtccaaatggctttgcagaaaggaaatgagatgacagtatttaatcgcagcagtagcaaacttttcacatgctaatgtgcagctgagtgcactttatttaaaaagaatggataaatgcaatattcttgaggtcttgagggaatagtgaaacacattcctggtttttgcctacacttacgtgttagacaagaactatgatttttttttttaaagtactggtgtcaccctttgcctatatggtagagcaataatgctttttaaaaataaacttctgaaaacccaaggccaggtactgcattctgaatcagaatctcgcagtgtttctgtgaatagatttttttgtaaatatgacctttaagatattgtattatgtaaaatatgtatatacctttttttgtaggtcacaacaactcatttttacagagtttgtgaagctaaatatttaacattgttgatttcagtaagctgtgtggtgaggctaccagtggaagagacatcccttgacttttgtggcctgggggaggggtagtgctccacagcttttccttccccaccccccagccttagatgcctcgctcttttcaatctcttaatctaaatgctttttaaagagattatttgtttagatgtaggcattttaattttttaaaaattcctctaccagaactaagcactttgttaatttggggggaaagaatagatatggggaaataaacttaaaaaaaaatcaggaatttaaaaaaacgagcaatttgaagagaatcttttggattttaagcagtccgaaataatagcaattcatgggctgtgtgtgtgtgtgtatgtgtgtgtgtgtgtgtgtatgtttaattatgttaccttttcatcccctttaggagcgttttcagattttggttgctaagacctgaatcccatattgagatctcgagtagaatccttggtgtggtttctggtgtctgctcagctgtcccctcattctactaatgtgatgctttcattatgtccctgtggattagaatagtgtcagttatttcttaagtaactcagtacccagaacagccagttttactgtgattcagagccacagtctaactgagcaccttttaaacccctccctcttctgccccctaccacttttctgctgttgcctctctttgacacctgttttagtcagttgggaggaagggaaaaatcaagtttaattccctttatctgggttaattcatttggttcaaatagttgacggaattgggtttctgaatgtctgtgaatttcagaggtctctgctagccttggtatcattttctagcaataactgagagccagttaattttaagaatttcacacatttagccaatctttctagatgtctctgaaggtaagatcatttaatatctttgatatgcttacgagtaagtgaatcctgattatttccagacccaccaccagagtggatcttattttcaaagcagtatagacaattatgagtttgccctctttcccctaccaagttcaaaatatatctaagaaagattgtaaatccgaaaacttccattgtagtggcctgtgcttttcagatagtatactctcctgtttggagacagaggaagaaccaggtcagtctgtctctttttcagctcaattgtatctgacccttctttaagttatgtgtgtggggagaaatagaatggtgctcttatctttcttgactttaaaaaaattattaaaaacaaaaaaaaaataaatttttttgcaatcctttcctcagacctggctccaggctaactggaaggcagcactcccttttttatatagtagaaaaatgaagtttattataagtttttatattttctacttgttcatttggtgcaaactcaagatttcttttaataggtgcagtctttgagataatttgtttttacctgtattgccctttatcttttttaggtaattctttgtactcctgctgtctacctctcctcacaccccagcaccccccattttttcaaaccttggtatctgttgggtgaacagtataatcttttcatctgcttttagaatgtgggatatttccagtacctactttttttttttttttttgctgaatccaaagatatataaataaaatatatatattttataaagatcagaatgatataaaggagatacatgtttcttcctttaaaaaataaacggaagttacattgttaatgttcatattatgatgccacttttctaaactgcatctggattgaaaggtgtaaatatcaataacagtgctacttagttatcagtatttaatatctgaggtgagttgggggtatctatattaggggtagggtattacagaagataattggcttgatgtcctagaagttctttgatccagaggtgggtgcagctgaaagtaaacagaatggattgccagttacatgtatgcctgcccagttccctttttatttgcagaagctgtgagttttgttcacaattaggttcctaggagcaaaacctcaaggattgatttattgttttcaactccaaggcacactgttaataaacgagcagggtgttttctctcttcctttctaatatatggagtttcgaagaataaaatatgagagcaatatttaaattctcaggaattgacttatactcttgagaatgaattcagtttcaatcaagtttacattatgttgcttaaaaaaatagaaattattctttatcttgcaaagaattgaaaccacatgaaatgacttatgggggatggtgagctgtgactgctttgctgaccattttggatgtcattgtaaataaaggtttctatttaaaattggagcctaaagagttttttttttttttttttttttttaaatccctgttgggttaagggtaaagga

SEQ ID NO: 10170 - protein, 108 aa, Homo sapiens [sequence omitted]

SEQ ID NO: 10171 - DNA, 2397 bp, Homo sapiens
atggtgttcaaaacagaaatgttttttggcattccacctcctagggatataattctggagacatggagtgttactgatcataaaacttttgtgtcacttttttctgccttgctagccaaaatctcttaaatacacgtaggtgggccagagaacattggaagaatcaagagagattagaatatctggtttctctagttgcagtattggacaaagagcatagtcccagccttcaggtgtagtagttctgtgttgaccctttgtccagtggaattggtgattctgaattgtcctttactaatggtgttgagttgctctgtccctattatttgccctaggctttctcctaatgaaggttttcatttgccattcatgtcctgtaatacttcacctccaggaactgtcatggatgtccaaatggctttgcagaaaggaaatgagatgacagtatttaatcgcagcagtagcaaacttttcacatgctaatgtgcagctgagtgcactttatttaaaaagaatggataaatgcaatattcttgaggtcttgagggaatagtgaaacacattcctggtttttgcctacacttacgtgttagacaagaactatgatttttttttttaaagtactggtgtcaccctttgcctatatggtagagcaataatgctttttaaaaataaacttctgaaaacccaaggccaggtactgcattctgaatcagaatctcgcagtgtttctgtgaatagatttttttgtaaatatgacctttaagatattgtattatgtaaaatatgtatatacctttttttgtaggtcacaacaactcatttttacagagtttgtgaagctaaatatttaacattgttgatttcagtaagctgtgtggtgaggctaccagtggaagagacatcccttgacttttgtggcctgggggaggggtagtgctccacagcttttccttccccaccccccagccttagatgcctcgctcttttcaatctcttaatctaaatgctttttaaagagattatttgtttagatgtaggcattttaattttttaaaaattcctcctaccaagttcaaaatatatctaagaaagattgtaaatccgaaaacttccattgtagtggcctgtgcttttcagatagtatactctcctgtttggagacagaggaagaaccaggtcagtctgtctctttttcagctcaattgtatctgacccttctttaagttatgtgtgtggggagaaatagaatggtgctcttatctttcttgactttaaaaaaattattaaaaacaaaaaaaaaataaatttttttgcaatcctttcctcagacctggctccaggctaactggaaggcagcactcccttttttatatagtagaaaaatgaagtttattataagtttttatattttctacttgttcatttggtgcaaactcaagatttcttttaataggtgcagtctttgagataatttgtttttacctgtattgccctttatcttttttaggtaattctttgtactcctgctgtctacctctcctcacaccccagcaccccccattttttcaaaccttggtatctgttgggtgaacagtataatcttttcatctgcttttagaatgtgggatatttccagtacctactttttttttttttttttgctgaatccaaagatatataaataaaatatatatattttataaagatcagaatgatataaaggagatacatgtttcttcctttaaaaaataaacggaagttacattgttaatgttcatattatgatgccacttttctaaactgcatctggattgaaaggtgtaaatatcaataacagtgctacttagttatcagtatttaatatctgaggtgagttgggggtatctatattaggggtagggtattacagaagataattggcttgatgtcctagaagttctttgatccagaggtgggtgcagctgaaagtaaacagaatggattgccagttacatgtatgcctgcccagttccctttttatttgcagaagctgtgagttttgttcacaattaggttcctaggagcaaaacctcaaggattgatttattgttttcaactccaaggcacactgttaataaacgagcagggtgttttctctcttcctttctaatatatggagtttcgaagaataaaatatgagagcaatatttaaattctcaggaattgacttatactcttgagaatgaattcagtttcaatcaagtttacattatgttgcttaaaaaaatagaaattattctttatcttgcaaagaattgaaaccacatgaaatgacttatgggggatggtgagctgtgactgctttgctgaccattttggatgtcattgtaaataaaggtttctatttaaaattgg

SEQ ID NO: 10172 - protein, 61 aa, Homo sapiens
MVLSCSVPIICPRLSPNEGFHLPFMSCNTSPPGTVMDVQMALQKGNEMTVFNRSSSKLFTC

SEQ ID NO: 10173 - DNA, 2460 bp, Homo sapiens
atggtgttcaaaacagaaatgttttttggcattccacctcctagggatataattctggagacatggagtgttactgatcataaaacttttgtgtcacttttttctgccttgctagccaaaatctcttaaatacacgtaggtgggccagagaacattggaagaatcaagagagattagaatatctggtttctctagttgcagtattggacaaagagcatagtcccagccttcaggtgtagtagttctgtgttgaccctttgtccagtggaattggtgattctgaattgtcctttactaatggtgttgagttgctctgtccctattatttgccctaggctttctcctaatgaaggttttcatttgccattcatgtcctgtaatacttcacctccaggaactgtcatggatgtccaaatggctttgcagaaaggaaatgagatgacagtatttaatcgcagcagtagcaaacttttcacatgctaatgtgcagctgagtgcactttatttaaaaagaatggataaatgcaatattcttgaggtcttgagggaatagtgaaacacattcctggtttttgcctacacttacgtgttagacaagaactatgatttttttttttaaagtactggtgtcaccctttgcctatatggtagagcaataatgctttttaaaaataaacttctgaaaacccaaggccaggtactgcattctgaatcagaatctcgcagtgtttctgtgaatagatttttttgtaaatatgacctttaagatattgtattatgtaaaatatgtatatacctttttttgtaggtcacaacaactcatttttacagagtttgtgaagctaaatatttaacattgttgatttcagtaagctgtgtggtgaggctaccagtggaagagacatcccttgacttttgtggcctgggggaggggtagtgctccacagcttttccttccccaccccccagccttagatgcctcgctcttttcaatctcttaatctaaatgctttttaaagagattatttgtttagatgtaggcattttaattttttaaaaattcctcctaccaagttcaaaatatatctaagaaagattgtaaatccgaaaacttccattgtagtggcctgtgcttttcagatagtatactctcctgtttggagacagaggaagaaccaggtcagtctgtctctttttcagctcaattgtatctgacccttctttaagttatgtgtgtggggagaaatagaatggtgctcttatctttcttgactttaaaaaaattattaaaaacaaaaaaaaaataaatttttttgcaatcctttcctcagacctggctccaggctaactggaaggcagcactcccttttttatatagtagaaaaatgaagtttattataagtttttatattttctacttgttcatttggtgcaaactcaagatttcttttaataggtgcagtctttgagataatttgtttttacctgtattgccctttatcttttttaggtaattctttgtactcctgctgtctacctctcctcacaccccagcaccccccattttttcaaaccttggtatctgttgggtgaacagtataatcttttcatctgcttttagaatgtgggatatttccagtacctactttttttttttttttttgctgaatccaaagatatataaataaaatatatatattttataaagatcagaatgatataaaggagatacatgtttcttcctttaaaaaataaacggaagttacattgttaatgttcatattatgatgccacttttctaaactgcatctggattgaaaggtgtaaatatcaataacagtgctacttagttatcagtatttaatatctgaggtgagttgggggtatctatattaggggtagggtattacagaagataattggcttgatgtcctagaagttctttgatccagaggtgggtgcagctgaaagtaaacagaatggattgccagttacatgtatgcctgcccagttccctttttatttgcagaagctgtgagttttgttcacaattaggttcctaggagcaaaacctcaaggattgatttattgttttcaactccaaggcacactgttaataaacgagcagggtgttttctctcttcctttctaatatatggagtttcgaagaataaaatatgagagcaatatttaaattctcaggaattgacttatactcttgagaatgaattcagtttcaatcaagtttacattatgttgcttaaaaaaatagaaattattctttatcttgcaaagaattgaaaccacatgaaatgacttatgggggatggtgagctgtgactgctttgctgaccattttggatgtcattgtaaataaaggtttctatttaaaattggagcctaaagagttttttttttttttttttttttttaaatccctgttgggttaagggtaaagga

SEQ ID NO: 10174 - protein, 61 aa, Homo sapiens; identical to SEQ ID NO: 10172

SEQ ID NO: 10175 - DNA, 3134 bp, Homo sapiens
ctttctgtcctctggagcacagatgttcatgcctgcatctacctccctcaccataactaaggtcagcgctgaatgaagccatcagggtcctgaaactgatcatggtgacactggattttaggcaatctacaaggctatctaggagacttagggcaggttcccctcataattcagtctacccctcataattcagtctactctgagtagggaacactatcagcatcatgggattgtgacaaaaaagcataagatggttttctggtgtgttggggttgttttgcctaaactatctgctcctgttttgtttttcatttctccttcatttaggacttaaagatggaggaagctatgagcaatacaggtatttcgttttattattaaagcctaaacaaagttctcctatcttggcccatccttcagtctcatctctgtgagtctgcacctgttatcttgagaaactgcccttccctctggtctgcccgagaccaggatcacccaccaaagataggtgtcacctaggagaccttctttgtatagttctttggggactttttctttcttggtgatggttaacattcattctcctttgacacttgaaaacttaggcagtttcagcgtcgaaagtggccagaaatgaagagaccttcttccaaatcactgggacaactgtgggaaggctgggaaggttaagaaacaacagaggtggacctccaaaaacatagaggcatcacctgactgcacaggcaatgaaaaaccatgtgggtgatttccagcagacctgtggtattggccaggaggcctgagaaagcaagcacgcactctcagtcaacatgacagattctggaggataaccagcaggagcagagataacttcaggaagtccatttttgcccctgcttttgctttggattatacctcaccagctgcacaaaatgcattttttcgtatcaaaaagtcaccactaaccctcccccagaagctcacaaaggaaaacggagagagcgagcgagagagatttccttggaaatttctcccaagggcgaaagtcattggaatttttaaatcataggggaaaagcagtcctgttctaaatcctcttattcttttggtttgtcacaaagaaggaactaagaagcaggacagaggcaacgtggagaggctgaaaacagtgcagagacgtttgacaatgagtcagtagcacaaaagagatgacatttacctagcactataaaccctggttgcctctgaagaaactgccttcattgtatatatgtgactatttacatgtaatcaacatgggaacttttaggggaacctaataagaaatcccaattttcaggagtggtggtgtcaataaacgctctgtggccagtgtaaaagaaaatccctcgcagttgtggacatttctgttcctgtccagataccatttctcctagtatttctttgttatgtcccagaactgatgttttttttttaaggtactgaaaagaaatgaagttgatgtatgtcccaagttttgatgaaactgtatttgtaaaaaaaattttgtagtttaagtattgtcatacagtgttcaaaaccccagccaatgaccagcagttggtatgaagaacctttgacattttgtaaaaggccatttcttgggagttttttggtgtgtctgtttttttaaagtattcaagatactaccagtcaacatctttttggaagaaaatgccttgggtttagaagattttcttaaaaggggagtagatggttgtagattgactaaaaagtctaccatacttcaagggactacaggtaagtctcatagtataccagctttggtacttcattttttaaaaaagtattaatcaattgcaaagaaattcgccttggccaacccttctttgtgtatcaggtagtctaacctgatacaagtagttgacagatttcaactatcaatcaccagtccaacccatttctcatttaacagatgacggagataatccctaaaagcacccacatttgtttcaatgccccaaacaggccaaggctccctagcaactccctagtggcgttttttaacttctcagaaactgttaccattatttgaaataggcttccttaacctcctttacccttaacccaacagggatttaaaaaaaaaaaaaaaaaaaaaaaactctttaggctccaattttaaatagaaacctttatttacaatgacatccaaaatggtcagcaaagcagtcacagctcaccatcccccataagtcatttcatgtggtttcaattctttgcaagataaagaataatttctatttttttaagcaacataatgtaaacttgattgaaactgaattcattctcaagagtataagtcaattcctgagaatttaaatattgctctcatattttattcttcgaaactccatatattagaaaggaagagagaaaacaccctgctcgtttattaacagtgtgccttggagttgaaaacaataaatcaatccttgaggttttgctcctaggaacctaattgtgaacaaaactcacagcttctgcaaataaaaagggaactgggcaggcatacatgtaactggcaatccattctgtttactttcagctgcacccacctctggatcaaagaacttctaggacatcaagccaattatcttctgtaataccctacccctaatatagatacccccaactcacctcagatattaaatactgataactaagtagcactgttattgatatttacacctttcaatccagatgcagtttagaaaagtggcatcataatatgaacattaacaatgtaacttccgtttattttttaaaggaagaaacatgtatctcctttatatcattctgatctttataaaatatatatattttatttatatatctttggattcagcaaaaaaaaaaaaaaaaagtaggtactggaaatatcccacattctaaaagcagatgaaaagattatactgttcacccaacagataccaaggtttgaaaaaatggggggtgctggggtgtgaggagaggtagacagcaggagtacaaagaattacctaaaaaagataaagggcaatacaggtaaaaacaaattatctcaaagactgcacctattaaaagaaatcttg

SEQ ID NO: 10176 - protein, 39 aa, Homo sapiens
MTEIIPKSTHICFNAPNRPRLPSNSLVAFFNFSETVTII

SEQ ID NO: 10177 - DNA, 5952 bp, Homo sapiens
ctatgctactcccgggccatttctggacaacagctgctattttcacttgagccgaagttaatttctcggggagttctcgggcgcgcacaggcagctcggtttgccctgcgattgagctgcgggtcgcggccggcgccggcctctccaatggcaaatgtgtgtggctggaggcgagcgcgaggctttcggcaaaggcagtcgagtgtttgcagaccggggcgagtcctgtgaaagcagataaaagaaaacatttattaacgtgtcattacgaggggagcgcccggccggggctgtcgcactccccgcggaacatttggctccctccagctccgagagaggagaagaagaaagcggaaaagaggcagattcacgtcgtttccagccaagtggacctgatcgatggccctcctgaatttatcacgatatttgatttattagcgatgccccctggtttgtgtgttacgcacacacacgtgcacacaaggctctggctcgcttccctccctcgtttccagctcctgggcgaatcccacatctgtttcaactctccgccgagggcgagcaggagcgagagtgtgtcgagtgagtgtgcgtctgtgtgtcccggcgagggtgcgcgctcggcgccgggagcgcggccagccgagtccggaggcatcgggaggtcgagagccgccgggaccccagctctgcgttcactgccccgtccggagctggacttcggggccggggccggggccgtgcgccggggacaggcagggccgggtcgcgggccgcgcgtcccccaggccggagatctgcgagtgaagagggacgagggaaaagaaacaaagccacagacgcaacttgagactcccgcatcccaaaagaagcaccagatcagcaaaaaaagaagatgggccccccgagcctcgtgctgtgcttgctgtccgcaactgtgttctccctgctgggtggaagctcggccttcctgtcgcaccaccgcctgaaaggcaggtttcagagggaccgcaggaacatccgccccaacatcatcctggtgctgacggacgaccaggatgtggagctgggttccatgcaggtgatgaacaagacccggcgcatcatggagcagggcggggcgcacttcatcaacgccttcgtgaccacacccatgtgctgcccctcacgctcctccatcctcactggcaagtacgtccacaaccacaacacctacaccaacaatgagaactgctcctcgccctcctggcaggcacagcacgagagccgcacctttgccgtgtacctcaatagcactggctaccggacagctttcttcgggaagtatcttaatgaatacaacggctcctacgtgccacccggctggaaggagtgggtcggactccttaaaaactcccgcttttataactacacgctgtgtcggaacggggtgaaagagaagcacggctccgactactccaaggattacctcacagacctcatcaccaatgacagcgtgagcttcttccgcacgtccaagaagatgtacccgcacaggccagtcctcatggtcatcagccatgcagccccccacggccctgaggattcagccccacaatattcacgcctcttcccaaacgcatctcagcacatcacgccgagctacaactacgcgcccaacccggacaaacactggatcatgcgctacacggggcccatgaagcccatccacatggaattcaccaacatgctccagcggaagcgcttgcagaccctcatgtcggtggacgactccatggagacgatttacaacatgctggttgagacgggcgagctggacaacacgtacatcgtatacaccgccgaccacggttaccacatcggccagtttggcctggtgaaagggaaatccatgccatatgagtttgacatcagggtcccgttctacgtgaggggccccaacgtggaagccggctgtctgaatccccacatcgtcctcaacattgacctggcccccaccatcctggacattgcaggcctggacatacctgcggatatggacgggaaatccatcctcaagctgctggacacggagcggccggtgaatcggtttcacttgaaaaagaagatgagggtctggcgggactccttcttggtggagagaggcaagctgctacacaagagagacaatgacaaggtggacgcccaggaggagaactttctgcccaagtaccagcgtgtgaaggacctgtgtcagcgtgctgagtaccagacggcgtgtgagcagctgggacagaagtggcagtgtgtggaggacgccacggggaagctgaagctgcataagtgcaagggccccatgcggctgggcggcagcagagccctctccaacctcgtgcccaagtactacgggcagggcagcgaggcctgcacctgtgacagcggggactacaagctcagcctggccggacgccggaaaaaactcttcaagaagaagtacaaggccagctatgtccgcagtcgctccatccgctcagtggccatcgaggtggacggcagggtgtaccacgtaggcctgggtgatgccgcccagccccgaaacctcaccaagcggcactggccaggggcccctgaggaccaagatgacaaggatggtggggacttcagtggcactggaggccttcccgactactcagccgccaaccccattaaagtgacacatcggtgctacatcctagagaacgacacagtccagtgtgacctggacctgtacaagtccctgcaggcctggaaagaccacaagctgcacatcgaccacgagattgaaaccctgcagaacaaaattaagaacctgagggaagtccgaggtcacctgaagaaaaagcggccagaagaatgtgactgtcacaaaatcagctaccacacccagcacaaaggccgcctcaagcacagaggctccagtctgcatcctttcaggaagggcctgcaagagaaggacaaggtgtggctgttgcgggagcagaagcgcaagaagaaactccgcaagctgctcaagcgcctgcagaacaacgacacgtgcagcatgccaggcctcacgtgcttcacccacgacaaccagcactggcagacggcgcctttctggacactggggcctttctgtgcctgcaccagcgccaacaataacacgtactggtgcatgaggaccatcaatgagactcacaatttcctcttctgtgaatttgcaactggcttcctagagtactttgatctcaacacagacccctaccagctgatgaatgcagtgaacacactggacagggatgtcctcaaccagctacacgtacagctcatggagctgaggagctgcaagggttacaagcagtgtaacccccggactcgaaacatggacctgggacttaaagatggaggaagctatgagcaatacaggcagtttcagcgtcgaaagtggccagaaatgaagagaccttcttccaaatcactgggacaactgtgggaaggctgggaaggttaagaaacaacagaggtggacctccaaaaacatagaggcatcacctgactgcacaggcaatgaaaaaccatgtgggtgatttccagcagacctgtggtattggccaggaggcctgagaaagcaagcacgcactctcagtcaacatgacagattctggaggataaccagcaggagcagagataacttcaggaagtccatttttgcccctgcttttgctttggattatacctcaccagctgcacaaaatgcattttttcgtatcaaaaagtcaccactaaccctcccccagaagctcacaaaggaaaacggagagagcgagcgagagagatttccttggaaatttctcccaagggcgaaagtcattggaatttttaaatcataggggaaaagcagtcctgttctaaatcctcttattcttttggtttgtcacaaagaaggaactaagaagcaggacagaggcaacgtggagaggctgaaaacagtgcagagacgtttgacaatgagtcagtagcacaaaagagatgacatttacctagcactataaaccctggttgcctctgaagaaactgccttcattgtatatatgtgactatttacatgtaatcaacatgggaacttttaggggaacctaataagaaatcccaattttcaggagtggtggtgtcaataaacgctctgtggccagtgtaaaagaaaatccctcgcagttgtggacatttctgttcctgtccagataccatttctcctagtatttctttgttatgtcccagaactgatgttttttttttaaggtactgaaaagaaatgaagttgatgtatgtcccaagttttgatgaaactgtatttgtaaaaaaaattttgtagtttaagtattgtcatacagtgttcaaaaccccagccaatgaccagcagttggtatgaagaacctttgacattttgtaaaaggccatttcttgggagttttttggtgtgtctgtttttttaaagtattcaagatactaccagtcaacatctttttggaagaaaatgccttgggtttagaagattttcttaaaaggggagtagatggttgtagattgactaaaaagtctaccatacttcaagggactacaggtaagtctcatagtataccagctttggtacttcattttttaaaaaagtattaatcaattgcaaagaaattcgccttggccaacccttctttgtgtatcaggtagtctaacctgatacaagtagttgacagatttcaactatcaatcaccagtccaacccatttctcatttaacagatgacggagataatccctaaaagcacccacatttgtttcaatgccccaaacaggccaaggctccctagcaactccctagtggcgttttttaacttctcagaaactgttaccattatttgaaataggcttccttaacctcctttacccttaacccaacagggatttaaaaaaaaaaaaaaaaaaaaaaaactctttaggctccaattttaaatagaaacctttatttacaatgacatccaaaatggtcagcaaagcagtcacagctcaccatcccccataagtcatttcatgtggtttcaattctttgcaagataaagaataatttctatttttttaagcaacataatgtaaacttgattgaaactgaattcattctcaagagtataagtcaattcctgagaatttaaatattgctctcatattttattcttcgaaactccatatattagaaaggaagagagaaaacaccctgctcgtttattaacagtgtgccttggagttgaaaacaataaatcaatccttgaggttttgctcctaggaacctaattgtgaacaaaactcacagcttctgcaaataaaaagggaactgggcaggcatacatgtaactggcaatccattctgtttactttcagctgcacccacctctggatcaaagaacttctaggacatcaagccaattatcttctgtaataccctacccctaatatagatacccccaactcacctcagatattaaatactgataactaagtagcactgttattgatatttacacctttcaatccagatgcagtttagaaaagtggcatcataatatgaacattaacaatgtaacttccgtttattttttaaaggaagaaacatgtatctcctttatatcattctgatctttataaaatatatatattttatttatatatctttggattcagcaaaaaaaaaaaaaaaaagtaggtactggaaatatcccacattctaaaagcagatgaaaagattatactgttcacccaacagataccaaggtttgaaaaaatggggggtgctggggtgtgaggagaggtagacagcaggagtacaaagaattacctaaaaaagataaagggcaatacaggtaaaaacaaattatctcaaagactgcacctattaaaagaaatcttg

SEQ ID NO: 10178 - protein, 870 aa, Homo sapiens; identical to SEQ ID NO: 1279

SEQ ID NO: 10179 - DNA, 5898 bp, Homo sapiens
ctatgctactcccgggccatttctggacaacagctgctattttcacttgagccgaagttaatttctcggggagttctcgggcgcgcacaggcagctcggtttgccctgcgattgagctgcgggtcgcggccggcgccggcctctccaatggcaaatgtgtgtggctggaggcgagcgcgaggctttcggcaaaggcagtcgagtgtttgcagaccggggcgagtcctgtgaaagcagataaaagaaaacatttattaacgtgtcattacgaggggagcgcccggccggggctgtcgcactccccgcggaacatttggctccctccagctccgagagaggagaagaagaaagcggaaaagaggcagattcacgtcgtttccagccaagtggacctgatcgatggccctcctgaatttatcacgatatttgatttattagcgatgccccctggtttgtgtgttacgcacacacacgtgcacacaaggctctggctcgcttccctccctcgtttccagctcctgggcgaatcccacatctgtttcaactctccgccgagggcgagcaggagcgagagtgtgtcgagtgagtgtgcgtctgtgtgtcccggcgagggtgcgcgctcggcgccgggagcgcggccagccgagtccggaggcatcgggaggtcgagagccgccgggaccccagctctgcgttcactgccccgtccggagctggacttcggggccggggccggggccgtgcgccggggacaggcagggccgggtcgcgggccgcgcgtcccccaggccggagatctgcgagtgaagagggacgagggaaaagaaacaaagccacagacgcaacttgagactcccgcatcccaaaagaagcaccagatcagcaaaaaaagaagatgggccccccgagcctcgtgctgtgcttgctgtccgcaactgtgttctccctgctgggtggaagctcggccttcctgtcgcaccaccgcctgaaaggcaggtttcagagggaccgcaggaacatccgccccaacatcatcctggtgctgacggacgaccaggatgtggagctgggttccatgcaggtgatgaacaagacccggcgcatcatggagcagggcggggcgcacttcatcaacgccttcgtgaccacacccatgtgctgcccctcacgctcctccatcctcactggcaagtacgtccacaaccacaacacctacaccaacaatgagaactgctcctcgccctcctggcaggcacagcacgagagccgcacctttgccgtgtacctcaatagcactggctaccggacagctttcttcgggaagtatcttaatgaatacaacggctcctacgtgccacccggctggaaggagtgggtcggactccttaaaaactcccgcttttataactacacgctgtgtcggaacggggtgaaagagaagcacggctccgactactccaaggattacctcacagacctcatcaccaatgacagcgtgagcttcttccgcacgtccaagaagatgtacccgcacaggccagtcctcatggtcatcagccatgcagccccccacggccctgaggattcagccccacaatattcacgcctcttcccaaacgcatctcagcacatcacgccgagctacaactacgcgcccaacccggacaaacactggatcatgcgctacacggggcccatgaagcccatccacatggaattcaccaacatgctccagcggaagcgcttgcagaccctcatgtcggtggacgactccatggagacgatttacaacatgctggttgagacgggcgagctggacaacacgtacatcgtatacaccgccgaccacggttaccacatcggccagtttggcctggtgaaagggaaatccatgccatatgagtttgacatcagggtcccgttctacgtgaggggccccaacgtggaagccggctgtctgaatccccacatcgtcctcaacattgacctggcccccaccatcctggacattgcaggcctggacatacctgcggatatggacgggaaatccatcctcaagctgctggacacggagcggccggtgaatcggtttcacttgaaaaagaagatgagggtctggcgggactccttcttggtggagagaggcaagctgctacacaagagagacaatgacaaggtggacgcccaggaggagaactttctgcccaagtaccagcgtgtgaaggacctgtgtcagcgtgctgagtaccagacggcgtgtgagcagctgggacagaagtggcagtgtgtggaggacgccacggggaagctgaagctgcataagtgcaagggccccatgcggctgggcggcagcagagccctctccaacctcgtgcccaagtactacgggcagggcagcgaggcctgcacctgtgacagcggggactacaagctcagcctggccggacgccggaaaaaactcttcaagaagaagtacaaggccagctatgtccgcagtcgctccatccgctcagtggccatcgaggtggacggcagggtgtaccacgtaggcctgggtgatgccgcccagccccgaaacctcaccaagcggcactggccaggggcccctgaggaccaagatgacaaggatggtggggacttcagtggcactggaggccttcccgactactcagccgccaaccccattaaagtgacacatcggtgctacatcctagagaacgacacagtccagtgtgacctggacctgtacaagtccctgcaggcctggaaagaccacaagctgcacatcgaccacgagattgaaaccctgcagaacaaaattaagaacctgagggaagtccgaggtcacctgaagaaaaagcggccagaagaatgtgactgtcacaaaatcagctaccacacccagcacaaaggccgcctcaagcacagaggctccagtctgcatcctttcaggaagggcctgcaagagaaggacaaggtgtggctgttgcgggagcagaagcgcaagaagaaactccgcaagctgctcaagcgcctgcagaacaacgacacgtgcagcatgccaggcctcacgtgcttcacccacgacaaccagcactggcagacggcgcctttctggacactggggcctttctgtgcctgcaccagcgccaacaataacacgtactggtgcatgaggaccatcaatgagactcacaatttcctcttctgtgaatttgcaactggcttcctagagtactttgatctcaacacagacccctaccagctgatgaatgcagtgaacacactggacagggatgtcctcaaccagctacacgtacagctcatggagctgaggagctgcaagggttacaagcagtgtaacccccggactcgaaacatggacctgggacttaaagatggaggaagctatgagcaatacaggggacaactgtgggaaggctgggaaggttaagaaacaacagaggtggacctccaaaaacatagaggcatcacctgactgcacaggcaatgaaaaaccatgtgggtgatttccagcagacctgtggtattggccaggaggcctgagaaagcaagcacgcactctcagtcaacatgacagattctggaggataaccagcaggagcagagataacttcaggaagtccatttttgcccctgcttttgctttggattatacctcaccagctgcacaaaatgcattttttcgtatcaaaaagtcaccactaaccctcccccagaagctcacaaaggaaaacggagagagcgagcgagagagatttccttggaaatttctcccaagggcgaaagtcattggaatttttaaatcataggggaaaagcagtcctgttctaaatcctcttattcttttggtttgtcacaaagaaggaactaagaagcaggacagaggcaacgtggagaggctgaaaacagtgcagagacgtttgacaatgagtcagtagcacaaaagagatgacatttacctagcactataaaccctggttgcctctgaagaaactgccttcattgtatatatgtgactatttacatgtaatcaacatgggaacttttaggggaacctaataagaaatcccaattttcaggagtggtggtgtcaataaacgctctgtggccagtgtaaaagaaaatccctcgcagttgtggacatttctgttcctgtccagataccatttctcctagtatttctttgttatgtcccagaactgatgttttttttttaaggtactgaaaagaaatgaagttgatgtatgtcccaagttttgatgaaactgtatttgtaaaaaaaattttgtagtttaagtattgtcatacagtgttcaaaaccccagccaatgaccagcagttggtatgaagaacctttgacattttgtaaaaggccatttcttgggagttttttggtgtgtctgtttttttaaagtattcaagatactaccagtcaacatctttttggaagaaaatgccttgggtttagaagattttcttaaaaggggagtagatggttgtagattgactaaaaagtctaccatacttcaagggactacaggtaagtctcatagtataccagctttggtacttcattttttaaaaaagtattaatcaattgcaaagaaattcgccttggccaacccttctttgtgtatcaggtagtctaacctgatacaagtagttgacagatttcaactatcaatcaccagtccaacccatttctcatttaacagatgacggagataatccctaaaagcacccacatttgtttcaatgccccaaacaggccaaggctccctagcaactccctagtggcgttttttaacttctcagaaactgttaccattatttgaaataggcttccttaacctcctttacccttaacccaacagggatttaaaaaaaaaaaaaaaaaaaaaaaactctttaggctccaattttaaatagaaacctttatttacaatgacatccaaaatggtcagcaaagcagtcacagctcaccatcccccataagtcatttcatgtggtttcaattctttgcaagataaagaataatttctatttttttaagcaacataatgtaaacttgattgaaactgaattcattctcaagagtataagtcaattcctgagaatttaaatattgctctcatattttattcttcgaaactccatatattagaaaggaagagagaaaacaccctgctcgtttattaacagtgtgccttggagttgaaaacaataaatcaatccttgaggttttgctcctaggaacctaattgtgaacaaaactcacagcttctgcaaataaaaagggaactgggcaggcatacatgtaactggcaatccattctgtttactttcagctgcacccacctctggatcaaagaacttctaggacatcaagccaattatcttctgtaataccctacccctaatatagatacccccaactcacctcagatattaaatactgataactaagtagcactgttattgatatttacacctttcaatccagatgcagtttagaaaagtggcatcataatatgaacattaacaatgtaacttccgtttattttttaaaggaagaaacatgtatctcctttatatcattctgatctttataaaatatatatattttatttatatatctttggattcagcaaaaaaaaaaaaaaaaagtaggtactggaaatatcccacattctaaaagcagatgaaaagattatactgttcacccaacagataccaaggtttgaaaaaatggggggtgctggggtgtgaggagaggtagacagcaggagtacaaagaattacctaaaaaagataaagggcaatacaggtaaaaacaaattatctcaaagactgcacctattaaaagaaatcttg

SEQ ID NO: 10180 - protein, 852 aa, Homo sapiens; identical to SEQ ID NO: 1281

SEQ ID NO: 10181 - DNA, 5739 bp, Homo sapiens
ctatgctactcccgggccatttctggacaacagctgctattttcacttgagccgaagttaatttctcggggagttctcgggcgcgcacaggcagctcggtttgccctgcgattgagctgcgggtcgcggccggcgccggcctctccaatggcaaatgtgtgtggctggaggcgagcgcgaggctttcggcaaaggcagtcgagtgtttgcagaccggggcgagtcctgtgaaagcagataaaagaaaacatttattaacgtgtcattacgaggggagcgcccggccggggctgtcgcactccccgcggaacatttggctccctccagctccgagagaggagaagaagaaagcggaaaagaggcagattcacgtcgtttccagccaagtggacctgatcgatggccctcctgaatttatcacgatatttgatttattagcgatgccccctggtttgtgtgttacgcacacacacgtgcacacaaggctctggctcgcttccctccctcgtttccagctcctgggcgaatcccacatctgtttcaactctccgccgagggcgagcaggagcgagagtgtgtcgaatctgcgagtgaagagggacgagggaaaagaaacaaagccacagacgcaacttgagactcccgcatcccaaaagaagcaccagatcagcaaaaaaagaagatgggccccccgagcctcgtgctgtgcttgctgtccgcaactgtgttctccctgctgggtggaagctcggccttcctgtcgcaccaccgcctgaaaggcaggtttcagagggaccgcaggaacatccgccccaacatcatcctggtgctgacggacgaccaggatgtggagctgggttccatgcaggtgatgaacaagacccggcgcatcatggagcagggcggggcgcacttcatcaacgccttcgtgaccacacccatgtgctgcccctcacgctcctccatcctcactggcaagtacgtccacaaccacaacacctacaccaacaatgagaactgctcctcgccctcctggcaggcacagcacgagagccgcacctttgccgtgtacctcaatagcactggctaccggacagctttcttcgggaagtatcttaatgaatacaacggctcctacgtgccacccggctggaaggagtgggtcggactccttaaaaactcccgcttttataactacacgctgtgtcggaacggggtgaaagagaagcacggctccgactactccaaggattacctcacagacctcatcaccaatgacagcgtgagcttcttccgcacgtccaagaagatgtacccgcacaggccagtcctcatggtcatcagccatgcagccccccacggccctgaggattcagccccacaatattcacgcctcttcccaaacgcatctcagcacatcacgccgagctacaactacgcgcccaacccggacaaacactggatcatgcgctacacggggcccatgaagcccatccacatggaattcaccaacatgctccagcggaagcgcttgcagaccctcatgtcggtggacgactccatggagacgatttacaacatgctggttgagacgggcgagctggacaacacgtacatcgtatacaccgccgaccacggttaccacatcggccagtttggcctggtgaaagggaaatccatgccatatgagtttgacatcagggtcccgttctacgtgaggggccccaacgtggaagccggctgtctgaatccccacatcgtcctcaacattgacctggcccccaccatcctggacattgcaggcctggacatacctgcggatatggacgggaaatccatcctcaagctgctggacacggagcggccggtgaatcggtttcacttgaaaaagaagatgagggtctggcgggactccttcttggtggagagaggcaagctgctacacaagagagacaatgacaaggtggacgcccaggaggagaactttctgcccaagtaccagcgtgtgaaggacctgtgtcagcgtgctgagtaccagacggcgtgtgagcagctgggacagaagtggcagtgtgtggaggacgccacggggaagctgaagctgcataagtgcaagggccccatgcggctgggcggcagcagagccctctccaacctcgtgcccaagtactacgggcagggcagcgaggcctgcacctgtgacagcggggactacaagctcagcctggccggacgccggaaaaaactcttcaagaagaagtacaaggccagctatgtccgcagtcgctccatccgctcagtggccatcgaggtggacggcagggtgtaccacgtaggcctgggtgatgccgcccagccccgaaacctcaccaagcggcactggccaggggcccctgaggaccaagatgacaaggatggtggggacttcagtggcactggaggccttcccgactactcagccgccaaccccattaaagtgacacatcggtgctacatcctagagaacgacacagtccagtgtgacctggacctgtacaagtccctgcaggcctggaaagaccacaagctgcacatcgaccacgagattgaaaccctgcagaacaaaattaagaacctgagggaagtccgaggtcacctgaagaaaaagcggccagaagaatgtgactgtcacaaaatcagctaccacacccagcacaaaggccgcctcaagcacagaggctccagtctgcatcctttcaggaagggcctgcaagagaaggacaaggtgtggctgttgcgggagcagaagcgcaagaagaaactccgcaagctgctcaagcgcctgcagaacaacgacacgtgcagcatgccaggcctcacgtgcttcacccacgacaaccagcactggcagacggcgcctttctggacactggggcctttctgtgcctgcaccagcgccaacaataacacgtactggtgcatgaggaccatcaatgagactcacaatttcctcttctgtgaatttgcaactggcttcctagagtactttgatctcaacacagacccctaccagctgatgaatgcagtgaacacactggacagggatgtcctcaaccagctacacgtacagctcatggagctgaggagctgcaagggttacaagcagtgtaacccccggactcgaaacatggacctgggacttaaagatggaggaagctatgagcaatacaggcagtttcagcgtcgaaagtggccagaaatgaagagaccttcttccaaatcactgggacaactgtgggaaggctgggaaggttaagaaacaacagaggtggacctccaaaaacatagaggcatcacctgactgcacaggcaatgaaaaaccatgtgggtgatttccagcagacctgtggtattggccaggaggcctgagaaagcaagcacgcactctcagtcaacatgacagattctggaggataaccagcaggagcagagataacttcaggaagtccatttttgcccctgcttttgctttggattatacctcaccagctgcacaaaatgcattttttcgtatcaaaaagtcaccactaaccctcccccagaagctcacaaaggaaaacggagagagcgagcgagagagatttccttggaaatttctcccaagggcgaaagtcattggaatttttaaatcataggggaaaagcagtcctgttctaaatcctcttattcttttggtttgtcacaaagaaggaactaagaagcaggacagaggcaacgtggagaggctgaaaacagtgcagagacgtttgacaatgagtcagtagcacaaaagagatgacatttacctagcactataaaccctggttgcctctgaagaaactgccttcattgtatatatgtgactatttacatgtaatcaacatgggaacttttaggggaacctaataagaaatcccaattttcaggagtggtggtgtcaataaacgctctgtggccagtgtaaaagaaaatccctcgcagttgtggacatttctgttcctgtccagataccatttctcctagtatttctttgttatgtcccagaactgatgttttttttttaaggtactgaaaagaaatgaagttgatgtatgtcccaagttttgatgaaactgtatttgtaaaaaaaattttgtagtttaagtattgtcatacagtgttcaaaaccccagccaatgaccagcagttggtatgaagaacctttgacattttgtaaaaggccatttcttgggagttttttggtgtgtctgtttttttaaagtattcaagatactaccagtcaacatctttttggaagaaaatgccttgggtttagaagattttcttaaaaggggagtagatggttgtagattgactaaaaagtctaccatacttcaagggactacaggtaagtctcatagtataccagctttggtacttcattttttaaaaaagtattaatcaattgcaaagaaattcgccttggccaacccttctttgtgtatcaggtagtctaacctgatacaagtagttgacagatttcaactatcaatcaccagtccaacccatttctcatttaacagatgacggagataatccctaaaagcacccacatttgtttcaatgccccaaacaggccaaggctccctagcaactccctagtggcgttttttaacttctcagaaactgttaccattatttgaaataggcttccttaacctcctttacccttaacccaacagggatttaaaaaaaaaaaaaaaaaaaaaaaactctttaggctccaattttaaatagaaacctttatttacaatgacatccaaaatggtcagcaaagcagtcacagctcaccatcccccataagtcatttcatgtggtttcaattctttgcaagataaagaataatttctatttttttaagcaacataatgtaaacttgattgaaactgaattcattctcaagagtataagtcaattcctgagaatttaaatattgctctcatattttattcttcgaaactccatatattagaaaggaagagagaaaacaccctgctcgtttattaacagtgtgccttggagttgaaaacaataaatcaatccttgaggttttgctcctaggaacctaattgtgaacaaaactcacagcttctgcaaataaaaagggaactgggcaggcatacatgtaactggcaatccattctgtttactttcagctgcacccacctctggatcaaagaacttctaggacatcaagccaattatcttctgtaataccctacccctaatatagatacccccaactcacctcagatattaaatactgataactaagtagcactgttattgatatttacacctttcaatccagatgcagtttagaaaagtggcatcataatatgaacattaacaatgtaacttccgtttattttttaaaggaagaaacatgtatctcctttatatcattctgatctttataaaatatatatattttatttatatatctttggattcagcaaaaaaaaaaaaaaaaagtaggtactggaaatatcccacattctaaaagcagatgaaaagattatactgttcacccaacagataccaaggtttgaaaaaatggggggtgctggggtgtgaggagaggtagacagcaggagtacaaagaattacctaaaaaagataaagggcaatacaggtaaaaacaaattatctcaaagactgcacctattaaaagaaatcttg

SEQ ID NO: 10182 - protein, 870 aa, Homo sapiens; identical to SEQ ID NO: 1279

SEQ ID NO: 10183 - DNA, 743 bp, Homo sapiens
ctctcctcacaccccagcaccccccattttttcaaaccttggtatctgttgggtgaacagtataatcttttcatctgcttttagaatgtgggatatttccagtacctactttttttttttttttttgctgaatccaaagatatataaataaaatatatatattttataaagatcagaatgatataaaggagatacatgtttcttcctttaaaaaataaacggaagttacattgttaatgttcatattatgatgccacttttctaaactgcatctggattgaaaggtgtaaatatcaataacagtgctacttagttatcagtatttaatatctgaggtgagttgggggtatctatattaggggtagggtattacagaagataattggcttgatgtcctagaagttctttgatccagaggtgggtgcagctgtagtcccttgaagtatggtagactttttagtcaatctacaaccatctactccccttttaagaaaatcttctaaacccaaggcattttcttccaaaaagatgttgactggtagtatcttgaatactttaaaaaaacagacacaccaaaaaactcccaagaaatggccttttacaaaatgtcaaaggttcttcataccaactgctggtcattggctggggttttgaacactgtatgacaatacttaaactacaaaattttttttacaaatacagtttcatcaaaacttgggacatacatcaacttcatttctttt

SEQ ID NO: 10184 - protein, 69 aa, Homo sapiens
MVDFLVNLQPSTPLLRKSSKPKAFSSKKMLTGSILNTLKKQTHQKTPKKWPFTKCQRFFIPTAGHWLGF

SEQ ID NO: 10185 - DNA, 1645 bp, Homo sapiens
ctttctgtcctctggagcacagatgttcatgcctgcatctacctccctcaccataactaaggtcagcgctgaatgaagccatcagggtcctgaaactgatcatggtgacactggattttaggcaatctacaaggctatctaggagacttagggcaggttcccctcataattcagtctacccctcataattcagtctactctgagtagggaacactatcagcatcatgggattgtgacaaaaaagcataagatggttttctggtgtgttggggttgttttgcctaaactatctgctcctgttttgtttttcatttctccttcatttaggacttaaagatggaggaagctatgagcaatacaggtatttcgttttattattaaagcctaaacaaagttctcctatcttggcccatccttcagtctcatctctgtgagtctgcacctgttatcttgagaaactgcccttccctctggtctgcccgagaccaggatcacccaccaaagataggtgtcacctaggagaccttctttgtatagttctttggggactttttctttcttggtgatggttaacattcattctcctttgacacttgaaaacttaggcagtttcagcgtcgaaagtggccagaaatgaagagaccttcttccaaatcactgggacaactgtgggaaggctgggaaggttaagaaacaacagaggtggacctccaaaaacatagaggcatcacctgactgcacaggcaatgaaaaaccatgtgggtgatttccagcagacctgtggtattggccaggaggcctgagaaagcaagcacgcactctcagtcaacatgacagattctggaggataaccagcaggagcagagataacttcaggaagtccatttttgcccctgcttttgctttggattatacctcaccagctgcacaaaatgcattttttcgtatcaaaaagtcaccactaaccctcccccagaagctcacaaaggaaaacggagagagcgagcgagagagatttccttggaaatttctcccaagggcgaaagtcattggaatttttaaatcataggggaaaagcagtcctgttctaaatcctcttattcttttggtttgtcacaaagaaggaactaagaagcaggacagaggcaacgtggagaggctgaaaacagtgcagagacgtttgacaatgagtcagtagcacaaaagagatgacatttacctagcactataaaccctggttgcctctgaagaaactgccttcattgtatatatgtgactatttacatgtaatcaacatgggaacttttaggggaacctaataagaaatcccaattttcaggagtggtggtgtcaataaacgctctgtggccagtgtaaaagaaaatccctcgcagttgtggacatttctgttcctgtccagataccatttctcctagtatttctttgttatgtcccagaactgatgttttttttttaaggtactgaaaagaaatgaagttgatgtatgtcccaagttttgatgaaactgtatttgtaaaaaaaattttgtagtttaagtattgtcatacagtgttcaaaaccccagccaatgaccagcagttggtatgaagaacctttgacattttgtaaaaggccatttcttggg

SEQ ID NO: 10186 - protein, 42 aa, Homo sapiens
RDLLPNHWDNCGKAGKVKKQQRWTSKNIEASPDCTGNEKPCG

SEQ ID NO: 10187 - DNA, 4463 bp, Homo sapiens
ctatgctactcccgggccatttctggacaacagctgctattttcacttgagccgaagttaatttctcggggagttctcgggcgcgcacaggcagctcggtttgccctgcgattgagctgcgggtcgcggccggcgccggcctctccaatggcaaatgtgtgtggctggaggcgagcgcgaggctttcggcaaaggcagtcgagtgtttgcagaccggggcgagtcctgtgaaagcagataaaagaaaacatttattaacgtgtcattacgaggggagcgcccggccggggctgtcgcactccccgcggaacatttggctccctccagctccgagagaggagaagaagaaagcggaaaagaggcagattcacgtcgtttccagccaagtggacctgatcgatggccctcctgaatttatcacgatatttgatttattagcgatgccccctggtttgtgtgttacgcacacacacgtgcacacaaggctctggctcgcttccctccctcgtttccagctcctgggcgaatcccacatctgtttcaactctccgccgagggcgagcaggagcgagagtgtgtcgagtgagtgtgcgtctgtgtgtcccggcgagggtgcgcgctcggcgccgggagcgcggccagccgagtccggaggcatcgggaggtcgagagccgccgggaccccagctctgcgttcactgccccgtccggagctggacttcggggccggggccggggccgtgcgccggggacaggcagggccgggtcgcgggccgcgcgtcccccaggccggagatctgcgagtgaagagggacgagggaaaagaaacaaagccacagacgcaacttgagactcccgcatcccaaaagaagcaccagatcagcaaaaaaagaagatgggccccccgagcctcgtgctgtgcttgctgtccgcaactgtgttctccctgctgggtggaagctcggccttcctgtcgcaccaccgcctgaaaggcaggtttcagagggaccgcaggaacatccgccccaacatcatcctggtgctgacggacgaccaggatgtggagctgggttccatgcaggtgatgaacaagacccggcgcatcatggagcagggcggggcgcacttcatcaacgccttcgtgaccacacccatgtgctgcccctcacgctcctccatcctcactggcaagtacgtccacaaccacaacacctacaccaacaatgagaactgctcctcgccctcctggcaggcacagcacgagagccgcacctttgccgtgtacctcaatagcactggctaccggacagctttcttcgggaagtatcttaatgaatacaacggctcctacgtgccacccggctggaaggagtgggtcggactccttaaaaactcccgcttttataactacacgctgtgtcggaacggggtgaaagagaagcacggctccgactactccaaggattacctcacagacctcatcaccaatgacagcgtgagcttcttccgcacgtccaagaagatgtacccgcacaggccagtcctcatggtcatcagccatgcagccccccacggccctgaggattcagccccacaatattcacgcctcttcccaaacgcatctcagcacatcacgccgagctacaactacgcgcccaacccggacaaacactggatcatgcgctacacggggcccatgaagcccatccacatggaattcaccaacatgctccagcggaagcgcttgcagaccctcatgtcggtggacgactccatggagacgatttacaacatgctggttgagacgggcgagctggacaacacgtacatcgtatacaccgccgaccacggttaccacatcggccagtttggcctggtgaaagggaaatccatgccatatgagtttgacatcagggtcccgttctacgtgaggggccccaacgtggaagccggctgtctgaatccccacatcgtcctcaacattgacctggcccccaccatcctggacattgcaggcctggacatacctgcggatatggacgggaaatccatcctcaagctgctggacacggagcggccggtgaatcggtttcacttgaaaaagaagatgagggtctggcgggactccttcttggtggagagaggcaagctgctacacaagagagacaatgacaaggtggacgcccaggaggagaactttctgcccaagtaccagcgtgtgaaggacctgtgtcagcgtgctgagtaccagacggcgtgtgagcagctgggacagaagtggcagtgtgtggaggacgccacggggaagctgaagctgcataagtgcaagggccccatgcggctgggcggcagcagagccctctccaacctcgtgcccaagtactacgggcagggcagcgaggcctgcacctgtgacagcggggactacaagctcagcctggccggacgccggaaaaaactcttcaagaagaagtacaaggccagctatgtccgcagtcgctccatccgctcagtggccatcgaggtggacggcagggtgtaccacgtaggcctgggtgatgccgcccagccccgaaacctcaccaagcggcactggccaggggcccctgaggaccaagatgacaaggatggtggggacttcagtggcactggaggccttcccgactactcagccgccaaccccattaaagtgacacatcggtgctacatcctagagaacgacacagtccagtgtgacctggacctgtacaagtccctgcaggcctggaaagaccacaagctgcacatcgaccacgagattgaaaccctgcagaacaaaattaagaacctgagggaagtccgaggtcacctgaagaaaaagcggccagaagaatgtgactgtcacaaaatcagctaccacacccagcacaaaggccgcctcaagcacagaggctccagtctgcatcctttcaggaagggcctgcaagagaaggacaaggtgtggctgttgcgggagcagaagcgcaagaagaaactccgcaagctgctcaagcgcctgcagaacaacgacacgtgcagcatgccaggcctcacgtgcttcacccacgacaaccagcactggcagacggcgcctttctggacactggggcctttctgtgcctgcaccagcgccaacaataacacgtactggtgcatgaggaccatcaatgagactcacaatttcctcttctgtgaatttgcaactggcttcctagagtactttgatctcaacacagacccctaccagctgatgaatgcagtgaacacactggacagggatgtcctcaaccagctacacgtacagctcatggagctgaggagctgcaagggttacaagcagtgtaacccccggactcgaaacatggacctgggacttaaagatggaggaagctatgagcaatacaggcagtttcagcgtcgaaagtggccagaaatgaagagaccttcttccaaatcactgggacaactgtgggaaggctgggaaggttaagaaacaacagaggtggacctccaaaaacatagaggcatcacctgactgcacaggcaatgaaaaaccatgtgggtgatttccagcagacctgtggtattggccaggaggcctgagaaagcaagcacgcactctcagtcaacatgacagattctggaggataaccagcaggagcagagataacttcaggaagtccatttttgcccctgcttttgctttggattatacctcaccagctgcacaaaatgcattttttcgtatcaaaaagtcaccactaaccctcccccagaagctcacaaaggaaaacggagagagcgagcgagagagatttccttggaaatttctcccaagggcgaaagtcattggaatttttaaatcataggggaaaagcagtcctgttctaaatcctcttattcttttggtttgtcacaaagaaggaactaagaagcaggacagaggcaacgtggagaggctgaaaacagtgcagagacgtttgacaatgagtcagtagcacaaaagagatgacatttacctagcactataaaccctggttgcctctgaagaaactgccttcattgtatatatgtgactatttacatgtaatcaacatgggaacttttaggggaacctaataagaaatcccaattttcaggagtggtggtgtcaataaacgctctgtggccagtgtaaaagaaaatccctcgcagttgtggacatttctgttcctgtccagataccatttctcctagtatttctttgttatgtcccagaactgatgttttttttttaaggtactgaaaagaaatgaagttgatgtatgtcccaagttttgatgaaactgtatttgtaaaaaaaattttgtagtttaagtattgtcatacagtgttcaaaaccccagccaatgaccagcagttggtatgaagaacctttgacattttgtaaaaggccatttcttggg

SEQ ID NO: 10188 - protein, 870 aa, Homo sapiens; identical to SEQ ID NO: 1279

SEQ ID NO: 10189 - DNA, 4250 bp, Homo sapiens
ctatgctactcccgggccatttctggacaacagctgctattttcacttgagccgaagttaatttctcggggagttctcgggcgcgcacaggcagctcggtttgccctgcgattgagctgcgggtcgcggccggcgccggcctctccaatggcaaatgtgtgtggctggaggcgagcgcgaggctttcggcaaaggcagtcgagtgtttgcagaccggggcgagtcctgtgaaagcagataaaagaaaacatttattaacgtgtcattacgaggggagcgcccggccggggctgtcgcactccccgcggaacatttggctccctccagctccgagagaggagaagaagaaagcggaaaagaggcagattcacgtcgtttccagccaagtggacctgatcgatggccctcctgaatttatcacgatatttgatttattagcgatgccccctggtttgtgtgttacgcacacacacgtgcacacaaggctctggctcgcttccctccctcgtttccagctcctgggcgaatcccacatctgtttcaactctccgccgagggcgagcaggagcgagagtgtgtcgaatctgcgagtgaagagggacgagggaaaagaaacaaagccacagacgcaacttgagactcccgcatcccaaaagaagcaccagatcagcaaaaaaagaagatgggccccccgagcctcgtgctgtgcttgctgtccgcaactgtgttctccctgctgggtggaagctcggccttcctgtcgcaccaccgcctgaaaggcaggtttcagagggaccgcaggaacatccgccccaacatcatcctggtgctgacggacgaccaggatgtggagctgggttccatgcaggtgatgaacaagacccggcgcatcatggagcagggcggggcgcacttcatcaacgccttcgtgaccacacccatgtgctgcccctcacgctcctccatcctcactggcaagtacgtccacaaccacaacacctacaccaacaatgagaactgctcctcgccctcctggcaggcacagcacgagagccgcacctttgccgtgtacctcaatagcactggctaccggacagctttcttcgggaagtatcttaatgaatacaacggctcctacgtgccacccggctggaaggagtgggtcggactccttaaaaactcccgcttttataactacacgctgtgtcggaacggggtgaaagagaagcacggctccgactactccaaggattacctcacagacctcatcaccaatgacagcgtgagcttcttccgcacgtccaagaagatgtacccgcacaggccagtcctcatggtcatcagccatgcagccccccacggccctgaggattcagccccacaatattcacgcctcttcccaaacgcatctcagcacatcacgccgagctacaactacgcgcccaacccggacaaacactggatcatgcgctacacggggcccatgaagcccatccacatggaattcaccaacatgctccagcggaagcgcttgcagaccctcatgtcggtggacgactccatggagacgatttacaacatgctggttgagacgggcgagctggacaacacgtacatcgtatacaccgccgaccacggttaccacatcggccagtttggcctggtgaaagggaaatccatgccatatgagtttgacatcagggtcccgttctacgtgaggggccccaacgtggaagccggctgtctgaatccccacatcgtcctcaacattgacctggcccccaccatcctggacattgcaggcctggacatacctgcggatatggacgggaaatccatcctcaagctgctggacacggagcggccggtgaatcggtttcacttgaaaaagaagatgagggtctggcgggactccttcttggtggagagaggcaagctgctacacaagagagacaatgacaaggtggacgcccaggaggagaactttctgcccaagtaccagcgtgtgaaggacctgtgtcagcgtgctgagtaccagacggcgtgtgagcagctgggacagaagtggcagtgtgtggaggacgccacggggaagctgaagctgcataagtgcaagggccccatgcggctgggcggcagcagagccctctccaacctcgtgcccaagtactacgggcagggcagcgaggcctgcacctgtgacagcggggactacaagctcagcctggccggacgccggaaaaaactcttcaagaagaagtacaaggccagctatgtccgcagtcgctccatccgctcagtggccatcgaggtggacggcagggtgtaccacgtaggcctgggtgatgccgcccagccccgaaacctcaccaagcggcactggccaggggcccctgaggaccaagatgacaaggatggtggggacttcagtggcactggaggccttcccgactactcagccgccaaccccattaaagtgacacatcggtgctacatcctagagaacgacacagtccagtgtgacctggacctgtacaagtccctgcaggcctggaaagaccacaagctgcacatcgaccacgagattgaaaccctgcagaacaaaattaagaacctgagggaagtccgaggtcacctgaagaaaaagcggccagaagaatgtgactgtcacaaaatcagctaccacacccagcacaaaggccgcctcaagcacagaggctccagtctgcatcctttcaggaagggcctgcaagagaaggacaaggtgtggctgttgcgggagcagaagcgcaagaagaaactccgcaagctgctcaagcgcctgcagaacaacgacacgtgcagcatgccaggcctcacgtgcttcacccacgacaaccagcactggcagacggcgcctttctggacactggggcctttctgtgcctgcaccagcgccaacaataacacgtactggtgcatgaggaccatcaatgagactcacaatttcctcttctgtgaatttgcaactggcttcctagagtactttgatctcaacacagacccctaccagctgatgaatgcagtgaacacactggacagggatgtcctcaaccagctacacgtacagctcatggagctgaggagctgcaagggttacaagcagtgtaacccccggactcgaaacatggacctgggacttaaagatggaggaagctatgagcaatacaggcagtttcagcgtcgaaagtggccagaaatgaagagaccttcttccaaatcactgggacaactgtgggaaggctgggaaggttaagaaacaacagaggtggacctccaaaaacatagaggcatcacctgactgcacaggcaatgaaaaaccatgtgggtgatttccagcagacctgtggtattggccaggaggcctgagaaagcaagcacgcactctcagtcaacatgacagattctggaggataaccagcaggagcagagataacttcaggaagtccatttttgcccctgcttttgctttggattatacctcaccagctgcacaaaatgcattttttcgtatcaaaaagtcaccactaaccctcccccagaagctcacaaaggaaaacggagagagcgagcgagagagatttccttggaaatttctcccaagggcgaaagtcattggaatttttaaatcataggggaaaagcagtcctgttctaaatcctcttattcttttggtttgtcacaaagaaggaactaagaagcaggacagaggcaacgtggagaggctgaaaacagtgcagagacgtttgacaatgagtcagtagcacaaaagagatgacatttacctagcactataaaccctggttgcctctgaagaaactgccttcattgtatatatgtgactatttacatgtaatcaacatgggaacttttaggggaacctaataagaaatcccaattttcaggagtggtggtgtcaataaacgctctgtggccagtgtaaaagaaaatccctcgcagttgtggacatttctgttcctgtccagataccatttctcctagtatttctttgttatgtcccagaactgatgttttttttttaaggtactgaaaagaaatgaagttgatgtatgtcccaagttttgatgaaactgtatttgtaaaaaaaattttgtagtttaagtattgtcatacagtgttcaaaaccccagccaatgaccagcagttggtatgaagaacctttgacattttgtaaaaggccatttcttggg

SEQ ID NO: 10190 - protein, 870 aa, Homo sapiens; identical to SEQ ID NO: 1279

SEQ ID NO: 10191 - DNA, 4409 bp, Homo sapiens
ctatgctactcccgggccatttctggacaacagctgctattttcacttgagccgaagttaatttctcggggagttctcgggcgcgcacaggcagctcggtttgccctgcgattgagctgcgggtcgcggccggcgccggcctctccaatggcaaatgtgtgtggctggaggcgagcgcgaggctttcggcaaaggcagtcgagtgtttgcagaccggggcgagtcctgtgaaagcagataaaagaaaacatttattaacgtgtcattacgaggggagcgcccggccggggctgtcgcactccccgcggaacatttggctccctccagctccgagagaggagaagaagaaagcggaaaagaggcagattcacgtcgtttccagccaagtggacctgatcgatggccctcctgaatttatcacgatatttgatttattagcgatgccccctggtttgtgtgttacgcacacacacgtgcacacaaggctctggctcgcttccctccctcgtttccagctcctgggcgaatcccacatctgtttcaactctccgccgagggcgagcaggagcgagagtgtgtcgagtgagtgtgcgtctgtgtgtcccggcgagggtgcgcgctcggcgccgggagcgcggccagccgagtccggaggcatcgggaggtcgagagccgccgggaccccagctctgcgttcactgccccgtccggagctggacttcggggccggggccggggccgtgcgccggggacaggcagggccgggtcgcgggccgcgcgtcccccaggccggagatctgcgagtgaagagggacgagggaaaagaaacaaagccacagacgcaacttgagactcccgcatcccaaaagaagcaccagatcagcaaaaaaagaagatgggccccccgagcctcgtgctgtgcttgctgtccgcaactgtgttctccctgctgggtggaagctcggccttcctgtcgcaccaccgcctgaaaggcaggtttcagagggaccgcaggaacatccgccccaacatcatcctggtgctgacggacgaccaggatgtggagctgggttccatgcaggtgatgaacaagacccggcgcatcatggagcagggcggggcgcacttcatcaacgccttcgtgaccacacccatgtgctgcccctcacgctcctccatcctcactggcaagtacgtccacaaccacaacacctacaccaacaatgagaactgctcctcgccctcctggcaggcacagcacgagagccgcacctttgccgtgtacctcaatagcactggctaccggacagctttcttcgggaagtatcttaatgaatacaacggctcctacgtgccacccggctggaaggagtgggtcggactccttaaaaactcccgcttttataactacacgctgtgtcggaacggggtgaaagagaagcacggctccgactactccaaggattacctcacagacctcatcaccaatgacagcgtgagcttcttccgcacgtccaagaagatgtacccgcacaggccagtcctcatggtcatcagccatgcagccccccacggccctgaggattcagccccacaatattcacgcctcttcccaaacgcatctcagcacatcacgccgagctacaactacgcgcccaacccggacaaacactggatcatgcgctacacggggcccatgaagcccatccacatggaattcaccaacatgctccagcggaagcgcttgcagaccctcatgtcggtggacgactccatggagacgatttacaacatgctggttgagacgggcgagctggacaacacgtacatcgtatacaccgccgaccacggttaccacatcggccagtttggcctggtgaaagggaaatccatgccatatgagtttgacatcagggtcccgttctacgtgaggggccccaacgtggaagccggctgtctgaatccccacatcgtcctcaacattgacctggcccccaccatcctggacattgcaggcctggacatacctgcggatatggacgggaaatccatcctcaagctgctggacacggagcggccggtgaatcggtttcacttgaaaaagaagatgagggtctggcgggactccttcttggtggagagaggcaagctgctacacaagagagacaatgacaaggtggacgcccaggaggagaactttctgcccaagtaccagcgtgtgaaggacctgtgtcagcgtgctgagtaccagacggcgtgtgagcagctgggacagaagtggcagtgtgtggaggacgccacggggaagctgaagctgcataagtgcaagggccccatgcggctgggcggcagcagagccctctccaacctcgtgcccaagtactacgggcagggcagcgaggcctgcacctgtgacagcggggactacaagctcagcctggccggacgccggaaaaaactcttcaagaagaagtacaaggccagctatgtccgcagtcgctccatccgctcagtggccatcgaggtggacggcagggtgtaccacgtaggcctgggtgatgccgcccagccccgaaacctcaccaagcggcactggccaggggcccctgaggaccaagatgacaaggatggtggggacttcagtggcactggaggccttcccgactactcagccgccaaccccattaaagtgacacatcggtgctacatcctagagaacgacacagtccagtgtgacctggacctgtacaagtccctgcaggcctggaaagaccacaagctgcacatcgaccacgagattgaaaccctgcagaacaaaattaagaacctgagggaagtccgaggtcacctgaagaaaaagcggccagaagaatgtgactgtcacaaaatcagctaccacacccagcacaaaggccgcctcaagcacagaggctccagtctgcatcctttcaggaagggcctgcaagagaaggacaaggtgtggctgttgcgggagcagaagcgcaagaagaaactccgcaagctgctcaagcgcctgcagaacaacgacacgtgcagcatgccaggcctcacgtgcttcacccacgacaaccagcactggcagacggcgcctttctggacactggggcctttctgtgcctgcaccagcgccaacaataacacgtactggtgcatgaggaccatcaatgagactcacaatttcctcttctgtgaatttgcaactggcttcctagagtactttgatctcaacacagacccctaccagctgatgaatgcagtgaacacactggacagggatgtcctcaaccagctacacgtacagctcatggagctgaggagctgcaagggttacaagcagtgtaacccccggactcgaaacatggacctgggacttaaagatggaggaagctatgagcaatacaggggacaactgtgggaaggctgggaaggttaagaaacaacagaggtggacctccaaaaacatagaggcatcacctgactgcacaggcaatgaaaaaccatgtgggtgatttccagcagacctgtggtattggccaggaggcctgagaaagcaagcacgcactctcagtcaacatgacagattctggaggataaccagcaggagcagagataacttcaggaagtccatttttgcccctgcttttgctttggattatacctcaccagctgcacaaaatgcattttttcgtatcaaaaagtcaccactaaccctcccccagaagctcacaaaggaaaacggagagagcgagcgagagagatttccttggaaatttctcccaagggcgaaagtcattggaatttttaaatcataggggaaaagcagtcctgttctaaatcctcttattcttttggtttgtcacaaagaaggaactaagaagcaggacagaggcaacgtggagaggctgaaaacagtgcagagacgtttgacaatgagtcagtagcacaaaagagatgacatttacctagcactataaaccctggttgcctctgaagaaactgccttcattgtatatatgtgactatttacatgtaatcaacatgggaacttttaggggaacctaataagaaatcccaattttcaggagtggtggtgtcaataaacgctctgtggccagtgtaaaagaaaatccctcgcagttgtggacatttctgttcctgtccagataccatttctcctagtatttctttgttatgtcccagaactgatgttttttttttaaggtactgaaaagaaatgaagttgatgtatgtcccaagttttgatgaaactgtatttgtaaaaaaaattttgtagtttaagtattgtcatacagtgttcaaaaccccagccaatgaccagcagttggtatgaagaacctttgacattttgtaaaaggccatttcttggg

SEQ ID NO: 10192 - protein, 852 aa, Homo sapiens; identical to SEQ ID NO: 1281

SEQ ID NO: 10193 - DNA, 1392 bp, Homo sapiens
ctttctgtcctctggagcacagatgttcatgcctgcatctacctccctcaccataactaaggtcagcgctgaatgaagccatcagggtcctgaaactgatcatggtgacactggattttaggcaatctacaaggctatctaggagacttagggcaggttcccctcataattcagtctacccctcataattcagtctactctgagtagggaacactatcagcatcatgggattgtgacaaaaaagcataagatggttttctggtgtgttggggttgttttgcctaaactatctgctcctgttttgtttttcatttctccttcatttaggacttaaagatggaggaagctatgagcaatacaggtatttcgttttattattaaagcctaaacaaagttctcctatcttggcccatccttcagtctcatctctgtgagtctgcacctgttatcttgagaaactgcccttccctctggtctgcccgagaccaggatcacccaccaaagataggtgtcacctaggagaccttctttgtatagttctttggggactttttctttcttggtgatggttaacattcattctcctttgacacttgaaaacttaggcagtttcagcgtcgaaagtggccagaaatgaagagaccttcttccaaatcactgggacaactgtgggaaggctgggaaggttaagaaacaacagaggtggacctccaaaaacatagaggcatcacctgactgcacaggcaatgaaaaaccatgtgggtgatttccagcagacctgtggtattggccaggaggcctgagaaagcaagcacgcactctcagtcaacatgacagattctggaggataaccagcaggagcagagataacttcaggaagtccatttttgcccctgcttttgctttggattatacctcaccagctgcacaaaatgcattttttcgtatcaaaaagtcaccactaaccctcccccagaagctcacaaaggaaaacggagagagcgagcgagagagatttccttggaaatttctcccaagggcgaaagtcattggaatttttaaatcataggggaaaagcagtcctgttctaaatcctcttattcttttggtttgtcacaaagaaggaactaagaagcaggacagaggcaacgtggagaggctgaaaacagtgcagagacgtttgacaatgagtcagtagcacaaaagagatgacatttacctagcactataaaccctggttgcctctgaagaaactgccttcattgtatatatgtgactatttacatgtaatcaacatgggaacttttaggggaacctaataagaaatcccaattttcaggagtggtggtgtcaataaacgctctgtggccagtgtaaaagaaaatccctcgc

SEQ ID NO: 10194 - protein, 42 aa, Homo sapiens; identical to SEQ ID NO: 10186

SEQ ID NO: 10195 - DNA, 3997 bp, Homo sapiens
ctatgctactcccgggccatttctggacaacagctgctattttcacttgagccgaagttaatttctcggggagttctcgggcgcgcacaggcagctcggtttgccctgcgattgagctgcgggtcgcggccggcgccggcctctccaatggcaaatgtgtgtggctggaggcgagcgcgaggctttcggcaaaggcagtcgagtgtttgcagaccggggcgagtcctgtgaaagcagataaaagaaaacatttattaacgtgtcattacgaggggagcgcccggccggggctgtcgcactccccgcggaacatttggctccctccagctccgagagaggagaagaagaaagcggaaaagaggcagattcacgtcgtttccagccaagtggacctgatcgatggccctcctgaatttatcacgatatttgatttattagcgatgccccctggtttgtgtgttacgcacacacacgtgcacacaaggctctggctcgcttccctccctcgtttccagctcctgggcgaatcccacatctgtttcaactctccgccgagggcgagcaggagcgagagtgtgtcgaatctgcgagtgaagagggacgagggaaaagaaacaaagccacagacgcaacttgagactcccgcatcccaaaagaagcaccagatcagcaaaaaaagaagatgggccccccgagcctcgtgctgtgcttgctgtccgcaactgtgttctccctgctgggtggaagctcggccttcctgtcgcaccaccgcctgaaaggcaggtttcagagggaccgcaggaacatccgccccaacatcatcctggtgctgacggacgaccaggatgtggagctgggttccatgcaggtgatgaacaagacccggcgcatcatggagcagggcggggcgcacttcatcaacgccttcgtgaccacacccatgtgctgcccctcacgctcctccatcctcactggcaagtacgtccacaaccacaacacctacaccaacaatgagaactgctcctcgccctcctggcaggcacagcacgagagccgcacctttgccgtgtacctcaatagcactggctaccggacagctttcttcgggaagtatcttaatgaatacaacggctcctacgtgccacccggctggaaggagtgggtcggactccttaaaaactcccgcttttataactacacgctgtgtcggaacggggtgaaagagaagcacggctccgactactccaaggattacctcacagacctcatcaccaatgacagcgtgagcttcttccgcacgtccaagaagatgtacccgcacaggccagtcctcatggtcatcagccatgcagccccccacggccctgaggattcagccccacaatattcacgcctcttcccaaacgcatctcagcacatcacgccgagctacaactacgcgcccaacccggacaaacactggatcatgcgctacacggggcccatgaagcccatccacatggaattcaccaacatgctccagcggaagcgcttgcagaccctcatgtcggtggacgactccatggagacgatttacaacatgctggttgagacgggcgagctggacaacacgtacatcgtatacaccgccgaccacggttaccacatcggccagtttggcctggtgaaagggaaatccatgccatatgagtttgacatcagggtcccgttctacgtgaggggccccaacgtggaagccggctgtctgaatccccacatcgtcctcaacattgacctggcccccaccatcctggacattgcaggcctggacatacctgcggatatggacgggaaatccatcctcaagctgctggacacggagcggccggtgaatcggtttcacttgaaaaagaagatgagggtctggcgggactccttcttggtggagagaggcaagctgctacacaagagagacaatgacaaggtggacgcccaggaggagaactttctgcccaagtaccagcgtgtgaaggacctgtgtcagcgtgctgagtaccagacggcgtgtgagcagctgggacagaagtggcagtgtgtggaggacgccacggggaagctgaagctgcataagtgcaagggccccatgcggctgggcggcagcagagccctctccaacctcgtgcccaagtactacgggcagggcagcgaggcctgcacctgtgacagcggggactacaagctcagcctggccggacgccggaaaaaactcttcaagaagaagtacaaggccagctatgtccgcagtcgctccatccgctcagtggccatcgaggtggacggcagggtgtaccacgtaggcctgggtgatgccgcccagccccgaaacctcaccaagcggcactggccaggggcccctgaggaccaagatgacaaggatggtggggacttcagtggcactggaggccttcccgactactcagccgccaaccccattaaagtgacacatcggtgctacatcctagagaacgacacagtccagtgtgacctggacctgtacaagtccctgcaggcctggaaagaccacaagctgcacatcgaccacgagattgaaaccctgcagaacaaaattaagaacctgagggaagtccgaggtcacctgaagaaaaagcggccagaagaatgtgactgtcacaaaatcagctaccacacccagcacaaaggccgcctcaagcacagaggctccagtctgcatcctttcaggaagggcctgcaagagaaggacaaggtgtggctgttgcgggagcagaagcgcaagaagaaactccgcaagctgctcaagcgcctgcagaacaacgacacgtgcagcatgccaggcctcacgtgcttcacccacgacaaccagcactggcagacggcgcctttctggacactggggcctttctgtgcctgcaccagcgccaacaataacacgtactggtgcatgaggaccatcaatgagactcacaatttcctcttctgtgaatttgcaactggcttcctagagtactttgatctcaacacagacccctaccagctgatgaatgcagtgaacacactggacagggatgtcctcaaccagctacacgtacagctcatggagctgaggagctgcaagggttacaagcagtgtaacccccggactcgaaacatggacctgggacttaaagatggaggaagctatgagcaatacaggcagtttcagcgtcgaaagtggccagaaatgaagagaccttcttccaaatcactgggacaactgtgggaaggctgggaaggttaagaaacaacagaggtggacctccaaaaacatagaggcatcacctgactgcacaggcaatgaaaaaccatgtgggtgatttccagcagacctgtggtattggccaggaggcctgagaaagcaagcacgcactctcagtcaacatgacagattctggaggataaccagcaggagcagagataacttcaggaagtccatttttgcccctgcttttgctttggattatacctcaccagctgcacaaaatgcattttttcgtatcaaaaagtcaccactaaccctcccccagaagctcacaaaggaaaacggagagagcgagcgagagagatttccttggaaatttctcccaagggcgaaagtcattggaatttttaaatcataggggaaaagcagtcctgttctaaatcctcttattcttttggtttgtcacaaagaaggaactaagaagcaggacagaggcaacgtggagaggctgaaaacagtgcagagacgtttgacaatgagtcagtagcacaaaagagatgacatttacctagcactataaaccctggttgcctctgaagaaactgccttcattgtatatatgtgactatttacatgtaatcaacatgggaacttttaggggaacctaataagaaatcccaattttcaggagtggtggtgtcaataaacgctctgtggccagtgtaaaagaaaatccctcgc

SEQ ID NO: 10196 - protein, 870 aa, Homo sapiens; identical to SEQ ID NO: 1279

SEQ ID NO: 10197 - DNA, 365 bp, Homo sapiens
gaatcaaacaatacggcctgggtggtatttatggagcatctgctgtatatcctgggcagtgttctgggccacgagaatgaagtcatcaacaggtcgttgtccttataagaaggacaaccctgtggggattctacaactcattcttcagacaaaccttctggaagcctacctacttttattctggtgtttgccctggtagcaatttaactgtcactttaagaagacgcgaatggggttggtgtctctggcttttgagacttcagggcacccctttcttggagagaaagatactcctttatcaggccagagagctgaagacctgttgggcttggggccactccctttaataaagaaacccacatcct

SEQ ID NO: 10198 - protein, 44 aa, Homo sapiens
MGLVSLAFETSGHPFLGEKDTPLSGQRAEDLLGLGPLPLIKKPT

SEQ ID NO: 10199 - DNA, 9029 bp, Homo sapiens
gtgacgcgctccaacatggcggcgccgtggggccgaggtgtcgcttcctgacggggcggcgcggacggacgcggccggtgccggccgggacgccgggcccgcagcctagctcgccatctcgctcacgccgcccgcccgcggggccgtcagcccccgccgggccggggccatgcaggagagccagaccaagagcatgttcgtgtcccgggccctggagaagatcctagccgacaaggaggtgaagcggccccagcactcccagctgcgcagggcctgccaggtggcgctcgatgaaattaaagcagaaatagaaaagcagaggcttggcactgctgcaccaccaaaggcaaacttcattgaagctgacaagtattttcttccattcgagctagcttgccagtccaagtccccaagggtagtcagcacatcccttgactgcttgcagaaactcatcgcatacgggcacatcactggcaacgcccctgacagtggagcccctgggaagcggctgatcgacagaattgttgaaaccatttgcagttgttttcagggccctcagactgatgaaggggttcagttacaaataattaaggctcttctgactgcagtgacttccccacacattgaaattcatgagggtactatcctgcagacagtgagaacatgttacaatatctatttggccagcaaaaatctcatcaatcaaaccactgccaaggctacccttactcagatgctgaacgtcattttcacccgcatggaaaaccaagtgttgcaggaggccagagaactggaaaaaccaatccagtcaaaaccccagtcccctgtgatccaagctgcagcagtatccccaaagttcgttcgtttgaagcacagtcaggcacaaagcaaaccaacaactcccgaaaaaacagatttaaccaacggtgaacatgccaggagtgattctggaaaagtaagcacagaaaatggagacgcacccagagaaagaggctcatcactgtcagggactgatgacggagcccaggaggtggtgaaggacatcttggaagatgtagtcacatctgccattaaagaagcagcggaaaagcatggtctgacagaacctgagagagttctaggtgaactggagtgccaggaatgtgctattcccccaggagttgatgaaaactcacagaccaacgggatagccgatgacaggcagtccttgtcgtcagcagataatctggaatcggatgcacaaggacatcaagtggctgccaggttctcccacgttctgcagaaggatgccttccttgtgttccgctccctgtgcaagctgtccatgaaaccccttggtgaaggccctccagacccaaaatcccatgagctgcgttccaaggtggtttccctgcagctgctcctctctgtgttgcaaaatgctggccccgtattcaggactcacgagatgttcatcaatgcaatcaagcaatatctctgtgtggccttgtccaaaaacggcgtctcttcagtgcctgatgtctttgagctctctcttgccatttttcttactcttctttcaaactttaaaatgcacttgaaaatgcagatagaggtctttttcaaagagattttcctgaacattttagaaacatcaacaagttcttttgagcacaggtggatggtcattcagactctgacgaggatctgtgcagatgcccagtgtgttgtggatatttatgtcaactacgactgtgatttaaatgctgctaacatttttgagcgccttgtaaatgatttatccaaaattgctcagggaagaagtggacatgagctgggaatgacacctctgcaggagctcagcctgaggaagaaaggcctggagtgcctcgtgtccattctcaagtgcatggtggagtggagcaaagacctgtatgtgaatcccaaccaccagaccagcctcggtcaggagaggctcacggatcaggaaataggggatgggaaaggccttgacatggcaagacggtgtagtgtgacgtccatggagtccacagtgtcctcggggacccagacaactgttcaggatgaccctgagcaatttgaggtcatcaagcaacaaaaagaaatcattgaacacggcatcgagctgttcaacaagaaacccaagagggggatccagtttctccaggagcagggcatgctgggaacgtcagttgaagacatagcccaattcctgcaccaggaggagcgcctggattccacccaagtaggcgattttctgggagatagcgcaaggttcaacaaggaggtgatgtatgcctacgtggaccaacttgacttctgtgaaaaagaatttgtctcagccctgcggacattcctagaaggtttccgcctacctggagaagcccaaaagattgaccgattaatggagaagtttgccgcaagatacatagaatgcaaccaagggcaaactctgtttgctagtgctgacactgcttatgtcctagcgtattcaattattatgctgactacagacttgcacagtcctcaggtaaaaaataaaatgacgaaagagcagtatattaaaatgaatcggggtatcaatgatagtaaagatctgccagaagagtatctctcaagcatctatgaagagatagaaggcaagaaaattgcaatgaaagaaacaaaagagctaacgattgcaaccaaatctactaagcagaatgtagctagtgaaaagcagcggcggctgctgtacaacttagagatggagcaaatggctaaaacagccaaagctctgatggaggctgtgagccatgccaaagccccgtttaccagtgccactcacctggaccatgtccggccaatgttcaaactggtgtggacgccactattggcagcctacagcatcggactccagaactgtgatgacactgaagtggcctccttgtgtttggaaggcatccgatgtgcaatccgaatcgcctgcatctttggaatgcagctggaacgagatgcctatgttcaggctcttgctcgcttctccctactcacagccagctccagcatcacagaaatgaagcagaaaaacatcgacaccattaagacgcttatcacagtggctcacaccgatggcaactaccttgggaattcctggcatgagatcttgaaatgcatcagccagctggagctcgctcagctgataggaaccggtgtgaagacgcgctacctgtctggatctgggcgtgaaagagaagggagcctgaagggccacacattggcaggagaagagttcatgggccttggcctcggtaatttggtgagtggcggagtggataaaagacagatggccagcttccaagaatcggttggtgagaccagctcgcagagtgtggttgtagctgtggacaggatttttactgggtctaccagactggatggaaatgcaatagttgactttgtccgctggctgtgtgctgtgtccatggatgaactggcttccccccaccatcctcgcatgttcagcttgcagaagattgtggagatatcatactacaacatgaatcggatccgactacagtggtctcgaatatggcatgtgattggagatcacttcaataaggttggctgcaaccctaatgaagatgtggctatctttgctgttgactcattaaggcaactctccatgaagtttcttgagaagggtgaattagccaacttccgtttccagaaagattttctgaggccctttgagcatattatgaagaaaaacaggtctcccaccatccgggacatggcgatccgctgcattgcccagatggtgaactcccaggcggccaacatccgctcaggttggaagaacatctttgccgtgttccaccaggcagcctctgatcatgatgggaacattgtggagctggccttccagaccacttgccacattgtcacaactattttccagcaccattttcctgcagccatcgattcctttcaggatgctgtgaagtgcttatcagagttcgcctgcaacgccgctttccctgacacgagcatggaagcgattcggctcatccgcttctgtggcaaatacgtctctgagaggcctcgggtgctacaagaatacacaagtgatgacatgaatgtagctcctggtgacagagtctgggtccgaggctggttccccatcttattcgaactctcctgcatcattaatagatgcaagttagatgtacgaacaaggggactcacagtcatgtttgagatcatgaagagctatggccacacctttgaaaagcactggtggcaggacctgttcagaatcgtgtttcggatttttgacaatatgaaactccctgagcaactgtcagagaaatctgagtggatgacaacaacctgcaatcacgcactttatgctatttgtgatgtttttacccagttttatgaagctttgaatgaagttcttctttctgatgtatttgcacaattgcagtggtgtgtcaaacaagataatgaacagttggcgcgatcaggtacaaattgcttagaaaacttagtaatatccaatggagagaaattcagtcctgaagtctgggatgaaacctgcaactgtatgttggatattttcaaaacaaccatcccacatgttttgctgacatggagacctgtaggaatggaggaagattcatcagaaaagcatttggatgtggatctggaccgccagtctttaagcagcatagataaaaatccctctgagaggggacagagccagctctctaacccaacagatgacagctggaagggtagaccatacgcaaatcagaaactgtttgccagcctcctcatcaagtgtgtggtccagttggaattgatacagaccattgacaacattgtgttctaccctgcgacgagcaaaaaggaggatgcagagcacatggttgccgcccagcaagacacgctggatgcagatatccacatagagacggaggatcagggcatgtataagtacatgtcttcccagcacctcttcaagctgttggactgtttgcaggaatcccattcattctcaaaggccttcaactccaattacgagcagcggactgtcctgtggcgagcaggttttaagggcaagtctaaacccaatcttctaaaacaagaaaccagcagcctggcctgttgtttgaggatcctgtttcgaatgtatgttgatgagaaccgcagggattcctgggaagaaatacagcagagacttttaactgtttgcagtgaagctcttgcctatttcatcactgtgaattctgagagccatcgggaggcctggacaagtctcttgttgttacttctaactaaaaccctcaaaataaatgatgaaaagttcaaagcacatgcttcaatgtactacccctacttgtgtgaaattatgcagtttgacctgatccctgagctccgagcagttctgcggaagttcttcctacggataggtgttgtgtataagatatggataccagaagagccatcacaggtaccagcagcactgtcaccagtgtggtagccctggctgcccaggccagtgctgcagctctgcagaatgttcagcatgccatttctgactggcacatctcgtgaagtttcatagaaacaaggagttggcatcttggatctcagaatggcctggaaacggatggcctctacgctgttccatcacagtctccaactaaggcttatggtatttcattaaactgttgcatacccagttagcacagtaggtggggagtctgcttcatttctatcattccatttttctgattaaactgtcaaatctgtcattgcatatgccatcgttttctagcaaaatcccatgattggctataaacgttttgtaagaagtcactctccttgaaaatactgaacatagctgtataggtttgtgattattagagaatatgttaataaaacttcttgtaacggctaactgccacctaaaatatgctgggttttctgttgtttgagtgtgttagagaaatttgaatgtttttgtcagttacgagtcagccgtaattagattagtttaaggacaggtcaggattagagaagagttgtttttgtgttttgttaatgtctgagtgatttttaaagtattttacaaaaagatattgaaaatttggttgaaggcagagtttagtaattaagttagaattaagagttttgcgaggttaaaaaaatgtgcctcgtggatctccctgttttagtaacatggagagaaaaagtctacacgaaaaagtgaacaatttaatgaagatgattagccttccttgaaataagtatttgtggatgggtgttaaattaaaatttccagaatacactgtccatctcacacactctgaaatctaatatatgaagtagtaatgaaaatgaagtagtaatttaaccagagttcatttatccttgaataaacctttttattttcacctcagaaaagtgagtgtactggcagttagtgtcactgctttgcacagtccccattaaaggaccctccagagagggacagtaactgtgcatgagaagccgctcccataagcctcctcagccagatgtcatgggtggaactggagctgtgtcggggccagcacagctgaactgtgacaatggcaggaggtggcatgtgcccagcacttccattaatctgagcctaggagttgaattctttggcaaggttggattctgaggtccttattatgttaatgatggtgcaatactctcacctgcagtagaactgagttctgctgcagcttgtgtaaaagtgggcagtacacaagtacgtcccaaagcctgtgagcagtatacgtggatgctcacccatgagaaggagcacacacgcctcattctctgccctcacccactgctcacctagagcatcgctgagcgttagacaaagtgttacacagaatgattaaaactttcagacttctacctatgctctttagtcctgtaaattgggttgtattgatgtcaactctggtgccttagaagttagtagtttgggaacctatctgtaaaatcagatgttttttctttgtagagaaggatttctggtgcttttgcttactaagagaccgatattcttaagttgttttcttgttttaacagccttgagaaatgtttggttttggccagcagaattcttgtctacttttttctttcccaaaaagtgttttttaatttctctaccaaagaaaaaatgagcaggtttaggtttttacatgacttatatacattagataaaaggagctgtataatttagcaggaagggactatgggagaatactttactgtgagtggaaaatgttagcacatttgactggtttgccctggaatccactgcacctttacactgcaccatgaaacctacactccctggtatcatagcgcgtcatcacctcaacaagtcagtcgtctccattgatatttgtacaaaaggtatacatggggaacacgtgttcattcattaagtccatcttgcgtgcagctatatccctgattggttatttttcctttccttctgaggttctcatgtcattttcttcatcggatgtgactaaaatttttctggtgtcttctgccctctctttaattttgcctcttgaggggtagcagatgtgtcagtgcattttattacttgctgaaacattcaggcttacatttcttattagtttagtattttaaaagatttaattttctgaatgaggcatttgaattgtaccagcaatggacttttaaaaaattggatgtaaaaccattcagggtgatttttcttgtcagtggacagtgacgaacagagatttgaaatcccttacctccaataataagccattcagcctaaattcatttttatgaataaatctcttctttctcatggtaaatgtggcttgtgccactcaaacactagtgaaagggtatgtacaaccgcaacatcaggccaggacaccatttatttaaccaagtaatggaggagagtgaaacattttccaaggccttatttctttttcagaatgctttaagtgttgattatatgtgctgggtctctagagaagtttttatttgttacaatactgctgctttgagcaattttgtttctcttcattgtctgttagggaaatcaccagctttggcatcttaacaacaaacagtggatgggtaatttttatttctgatacgcatctttagagtcaaatatatcttttccctgtactcctcatgtacaaccaaagaacatacattatgaaaattgtattataatatctggaaacacaacattttcctctggcaggtgacttttgtacgaaatgaaaaaaaaaaaacctgtattttttttgttgttcttttgtgattaaggatatacatttagtagtctttgttattaaaggaacctgctgataagtacaagtgtgaccatctcattcaaatgtttgttgttatgatgcaaatggatattggtttcaatagaagctggatccttaatactgcattttctgaattctgttttaatatttgtgttaaagtagacatagctgaactcacatggaatcctggagttttgttatcagcagctttgcagtttgggaaacaaagaaaccaaagctgagtgttttaaagaatgaacatatctggaaatccttgctctcaaaacaaaacaatataatctatcaaaggtgttttactcagtgttctaatttttaaaaaattttatctgcatatttgcatcaaatatttatgtgtaaaatgtatgttttacctccttaaaatgcctaaaagttagttaatagttactttggtttaacctatacacaatgattaagtgcatttaatattggtaatttaatgaaaaccattccttgcccaatggatgtataaatttttgaaagaataagcagaattatataatatgaaatgctatgtaaagttttctatgtaaaaatattatgtataatactattaaaatatcccatgctttgatcaggtggtacatcaataaaattttaaaaagtatagctgtt

SEQ ID NO: 10200 - protein, 1785 aa, Homo sapiens; identical to SEQ ID NO: 1283

SEQ ID NO: 10201 - DNA, 490 bp, Homo sapiens
gagttgatgaaaactcacagaccaacgggatagccgatgacaggcagtccttgtcgtcagcagataatctggaatcggatgcacaaggacatcaagtggctgccaggttctcccacgttctgcagaaggatgccttccttgtgttccgctccctgtgcaagctgtccatgaaaccccttggtgaaggccctccagacccaaagtaagcagacagcagttcttggccaccttcagtccaatgatccagcagcacatggtactgtgtttcacacttcccttgttccaagaagtttcagtgtcatgtctctttgtcagtgtaagtgcaggaacggttttacaacttttcagactcatgcagtctctagagtcctttcatatggaattgtctctgtatccccaccaaccaagattttgcccagttttgcttttcttggcatatgaatgctaaaaaagtctgtttattgaacacataaaaaacacatttttacta

SEQ ID NO: 10202 - protein, 44 aa, Homo sapiens
MTGSPCRQQIIWNRMHKDIKWLPGSPTFCRRMPSLCSAPCASCP

SEQ ID NO: 10203 - DNA, 622 bp, Homo sapiens
tatttgctggaagagagtcagagctggaagtgttccttgactgctagaaagttcttacggctgcctgtctgcaactaacctccttagtgtgccccgtcattctctccattttaagtctcttgtgccccctcctcttccttcatccatgcaggacaggctgcttctggaatgggtgggtgggtgggcaggtcagggagttccctagcttttttaccagtccagcctattctgggcagttagggccaggctattctgactccaccctttggctgctggcttttgctgagggttcgtatttgacaatttctggatataagtgagtgtgtatgtttcagacccaagtaggcgattttctgggagatagcgcaaggttcaacaaggaggtgatgtatgcctacgtggaccaacttgacttctgtgaaaaagaatttgtctcagccctgcggacattcctagaaggtttccgcctacctggagaagcccaaaagattgaccgattaatggagaagtttgccgcaagatacatagaatgcaaccaagggcaaactctgtttgctagtgctgacactgcttatgtcctagcgtattcaattattatgctgactacagacttgcacagtcc

SEQ ID NO: 10204 - protein, 97 aa, Homo sapiens
MFQTQVGDFLGDSARFNKEVMYAYVDQLDFCEKEFVSALRTFLEGFRLPGEAQKIDRLMEKFAARYIECNQGQTLFASADTAYVLAYSIIMLTTDLH

SEQ ID NO: 10205 - DNA, 2991 bp, Homo sapiens
aagagagaggaaaaaaaattcaaaataaacaaacaaacaaacaaggcagaaccaacctctacttcaaagcagccggcacaagccacccgtgtctgccacccagagaggggggtctctggcccgtggtggaggagttgcaggggggatcgtcagggggacagaggccgagtgacgtcctaggagccaccgggcaagaggcggaggagacccagagaggccagagagacagcgggccccagcgcgcggctcggggctggggcgccagaagtgggactggagcgaagtagaggatgccgaggagaaaacagcaggcacccaagcgggcggcaggctacgcccaggaggaacagctgaaagaagaggaggaaataaaagaagaagtgattttgattggcaccaagacgctctgtccaaaagcctgcagcagaacttgccttctcggtccgtctcgaaacccagcctgttcagctcggtgcagttgtaccgacagagcagcaagatgtgcgggactgtgttcacaggggccagcagattccgatgccgacagtgcagcgcggcctatgacaccctagtcgagctgactgtgcacatgaatgaaacgggccactatcaagatgacaaccgcaaaaaggacaagctcagacccacgagctattcaaagcccaggaaaagggctttccaggatatggacaaagaggatgctcaaaaggttctgaaatgtatgttttgtggcgactcctttgattccctccaagatttgagcgtccacatgattaaaacaaaacattaccaaaaagtgcctttgaaggagccagtcccaaccatttcctcgaaaatggtcaccccggctaagaaacgcgtttttgatgtcaatcggccgtgttcccccgattcaaccacaggatcttttgcagattctttttcttctcagaagaacgccaacttgcagttgtcctccaacaaccgctatggctaccaaaatggagccagctacacctggcagtttgaggcctgcaagtcccagatcttaaagtgcatggagtgtgggagctcccatgacaccttgcagcagctcaccacccacatgatggtcacaggtcactttctcaaggtcaccagctctgcctccaagaaagggaagcagctggtattagacccgttagcagtggagaaaatgcagtcgttgtctgaggccccaaacagtgattctctggctcccaagccatccagtaactcagcatcagattgtacagcctctacaactgagttaaagaaagagagtaaaaaagaaaggccagaggaaaccagcaaggatgagaaagtcgtgaaaagcgaggactatgaagatcctctacaaaaacctttagaccctacaatcaaatatcaatacctaagggaggaagacttggaagatggctcaaagggtggaggggacattttgaaatctttggaaaatactgtcaccacagccatcaacaaagcccaaaacggggcccccagctggagtgcctaccccagcatccacgcagcctaccagctgtctgagggcaccaagccgcctttgcctatgggatcccaggtactgcagatccggcctaatctcaccaacaagctgaggcccattgcaccaaagtggaaagtgatgccactggtttctatgcccacacacctggccccttacactcaagtcaagaaagagtcagaagacaaagatgaagcggtgaaggagtgtgggaaagaaagtccccacgaagaggcctcatctttcagccacagtgagggcgattctttccgcaaaagtgaaacacctccagaagccaaaaagaccgagctgggtcccctgaaggaggaggagaagctgatgaaagagggcagcgagaaggagaaaccccagcccctggagcccacatctgctctgagcaatgggtgcgccctcgccaaccacgccccggccctgccatgcatcaacccactcagcgccctgcagtccgtcctgaacaatcacttgggcaaagccacggagcccttgcgctcaccttcctgctccagcccaagttcaagcacaatttccatgttccacaagtcgaatctcaatgtcatggacaagccggtcttgagtcctgcctccacaaggtcagccagcgtgtccaggcgctacctgtttgagaacagcgatcagcccattgacctgaccaagtccaaaagcaagaaagccgagtcctcgcaagcacaatcttgtatgtccccacctcagaagcacgctctgtctgacatcgccgacatggtcaaagtcctccccaaagccaccaccccaaagccagcctcctcctccagggtcccccccatgaagctggaaatggatgtcaggcgctttgaggatgtctccagtgaagtctcaactttgcataaaagaaaaggccggcagtccaactggaatcctcagcatcttctgattctacaagcccagtttgcctcgagcctcttccagacatcagagggcaaatacctgctgtctgatctgggcccacaagagcgtatgcaaatctctaagtttacgggactctcaatgaccactatcagtcactggctggccaacgtcaagtaccagcttaggaaaacgggcgggacaaaatttctgaaaaacatggacaaaggccaccccatcttttattgcagtgactgtgcctcccagttcagaaccccttctacctacatcagtcacttagaatctcacctgggtttccaaatgaaggacatgacccgcttgtcagtggaccagcaaagcaaggtggagcaagagatctcccgggtatcgtcggctcagaggtctccagaaacaatagctgccgaagaggacacagactctaaattcaagtgtaagttgtgctgtcggacatttgtgagcaaacatgcggtaaaactccacctaagcaaaacgcacagcaagtcacccgaacaccattcacagtttgtaacagacgtggatgaaga

SEQ ID NO: 10206 - protein, 93 aa, Homo sapiens
MPRRKQQAPKRAAGYAQEEQLKEEEEIKEEVILIGTKTLCPKACSRTCLLGPSRNPACSARCSCTDRAARCAGLCSQGPADSDADSAARPMTP

SEQ ID NO: 10207 - DNA, 1622 bp, Homo sapiens
gagcttctggaacagccggaaaccttgtcaactgtccaggtagtttgtccacctgaagtctcacctatgacttctctggatcctttggcatcctagcactgaaatctgcaaagctgcttatgtactttctgtaaggtgaaaattacggatgcagcacctgtgattaagtcatgatggctggaagtaaatcttggtgaatatttctaaatgttttccacatttcccatacagaggtttgataatttgttcacctagtttccattttataattgaggttggcagtggagaccaagactcgatgtggtgtgggtcaatttggaagaattacttcgaagaaaatgagaaagaaacactcaaatgaaatcccttttgaggaaggagatactcttttccttaaaaaaaaaaaaatcaacatttgtatcaataaaggttgagatcagaaaatgtttcccgttcaatgagaaagatttggactgtgatgaagataaactaaaaagaaaagagtttgaccaactggcaagggtttgacccctttcccctttaaaaaaatcacactaaaactacagcttatgtttcgcatgagtggatgctctgaattgcaatgcaaagtgcttatgaaaacttaagatcttacattactacttcaaagagtacatgtgataggaattcctatagaagaaaatgaaaaaggatatagcttgaaaatccaaatttatagcaaattctgcatctatcatttggcgatgctatgactggatgctatcactatttggaagtatcaaaaatattacaaaggaaaattaagcttcattttactctatcttcttataaagtgaggcccacatcctggtgatgactatttccttaatgagactatgggattttatcaaactccataaaacatgattgcatttccttcactctgaaatcaccttattttaatttccacatgaaattgggatgcaatttgtgtgtacatttaatatgcgagggttccttctccacctctcactcactcctccccaaaaaagctttggccaaatctacagcatgttttacaatggacagagtcttaggattgaggcaagtacaatcaagaggagtcaggggctaagataaacaaaagaacatgaaaacagtgatggtgatgcctcatgtgattagctctatggtcccttcctcttctcagagtgacaggcagaaaaatcgacagttaattccagatccatcaggggctgtgctgcctttctacagaaatgatgagtttagagagcaagctgcagatgagtgtctgagcactcgcgggaggtgccgagtgtcatggcagaagttcgtgtggcatcgctgtctgctgcgtccaagagatgatagggtccttccagaagaggaacagcagggtagcgcagaaatggaaggaagaccactcttcccagtttctggccaatgggatgagggaagaagtgatgggcatcagttacagaactcattcacaccttcaatggttttggaagccacatgctccagatggcagagctaccctggaaagaaggttgcatctgagtcaccacgtggagatcaactttgtacatgtgaaacataaatgtttactgtgttgggccact

SEQ ID NO: 10208 - protein, 156 aa, Homo sapiens
MKTVMVMPHVISSMVPSSSQSDRQKNRQLIPDPSGAVLPFYRNDEFREQAADECLSTRGRCRVSWQKFVWHRCLLRPRDDRVLPEEEQQGSAEMEGRPLFPVSGQWDEGRSDGHQLQNSFTPSMVLEATCSRWQSYPGKKVASESPRGDQLCTCET

SEQ ID NO: 10209 - DNA, 486 bp, Homo sapiens
gctcattttctcgactgtaaaatgaggagaacagcaattccaacctacaggattgttggcgaccttaaatgagaaagtccaagtgcactgctttgacacacagaccgcctcacacctgagggtatacagtgttcaaaaaagcaaggggatgaaagacccagatgcaaagccttgaagagaaaatgaaggcaagttcttgtacttcacacacaaaaatcccgtaatgacctgaatgatggctgattcttaactgggctccagagacactggatgggcttcccaggatgccagaaccctgaaattacagagtccttcctataattccgggttccttcaagtaagaggtcgggcagcagattcttgatgcctccgggatgttgtctcttggcctgaacaagatttgcagaaatgtacaattattctagggacagacaatattgagaagggagaattcctcttgctcattgagagggaaagggactctca

SEQ ID NO: 10210 - protein, 37 aa, Homo sapiens
LGSRDTGWASQDARTLKLQSPSYNSGFLQVRGRAADS

SEQ ID NO: 10211 - DNA, 828 bp, Homo sapiens
atggggctgttgcaaggatttgatgaagttcaccccacaaagccctttccacaacgtctgcctacaatccaagaaaagcacgctgctgccccgcaagaccagaacacagagcccctccctccccaggagccggacctgagcagcagggggttaaagagcagtacccgggctgtccccgggtcagggtcgtttgcacgaaggcagagccgcggaagagggaaggaaatgccccgggtcccaggcggggcctcgagcgtgcccacgccgccccctgctggccacgcctggagttgcaggaaccgggcgccgggcgggacctcagctgcgggctccgcgctgctcccgcgccgcgtgggtgaagcgccctccccggccacgcactggggtctcacaggggccaggctgaaaaacaatgcacgccttaaaggcgggaggctggcctggcgcaggctgaggaacactgatgaacgacctcctgcaaaggattgtccccagaggacagggctagggggaagcaggacggcgcagcgtctacacccccgcgcgtgggtggcccccggaactgcccacacccctggctcccgggtcagccggtcactgccagatgcaccacccccaccgccacagccaggagaggggatgacatggggggctctggatctcttaactcctcaggcctccccaccaggcaaggttcaccacccctccttccagcagcctctagaaggtggaacgggcaaggaaacggattctacgctagagcctcccgaggagaacacagctggccggcacctggattttagcccaggagactgtgacggatgctga

SEQ ID NO: 10212 - protein, 275 aa, Homo sapiens
MGLLQGFDEVHPTKPFPQRLPTIQEKHAAAPQDQNTEPLPPQEPDLSSRGLKSSTRAVPGSGSFARRQSRGRGKEMPRVPGGASSVPTPPPAGHAWSCRNRAPGGTSAAGSALLPRRVGEAPSPATHWGLTGARLKNNARLKGGRLAWRRLRNTDERPPAKDCPQRTGLGGSRTAQRLHPRAWVAPGTAHTPGSRVSRSLPDAPPPPPQPGEGMTWGALDLLTPQASPPGKVHHPSFQQPLEGGTGKETDSTLEPPEENTAGRHLDFSPGDCDGC

SEQ ID NO: 10213 - DNA, 562 bp, Homo sapiens
tcttcacacctctcttactacaccctttgccatggtgtgccctcctgagtcacaacagcttggccatgggacttggtttggccattgggatgttcatggagccaacagaggcttgcatggggcccgtgtgttaagctttcatctctggagccccttctcctgctatgagaaggacatacctggctggcctgctggaggaaaagagacttggggagtagagatcaaggtatttggcagctgctggaaagttttccacatccagtgattggctgcatttggtggacacagggactcatcactatatgaactttaaagggatacagcttgtgaaaaattcctctgataaaagtcaaggctacttcaagagatggttttgaacgagcacttatgtcttgcctgctagaactgtgaaatttcagactttctagaaaaaaactaagcatttatttcagtagctcttctcattccctgaccaatgaaccaacatagccattctgctgctggttctggagacaattaccatgagcagcatccatgttctttacagcctactccactctca

SEQ ID NO: 10214 - protein, 77 aa, Homo sapiens
MVCPPESQQLGHGTWFGHWDVHGANRGLHGARVLSFHLWSPFSCYEKDIPGWPAGGKETWGVEIKVFGSCWKVFHIQ

SEQ ID NO: 10215 - DNA, 2590 bp, Homo sapiens
cgctgtcctgggtgcgcctcgggccgctgcgctcctggccagctccccccagcgcctgggaggcgacccccagtgcgcccgggttcaaaggcccggcgaggcagttccagcccctctggggggcggggaggcgacgggggtggtgcagaagccagaaaagcccgagccacagccggccagctccgcgcagggatgggcagcgcgctctgaaagtttatgaccgccgcagccaactcctggccggagctggagacgcagcgagcgatcggccggcctcgaacccccacagctggagggcgaggccagctgtacccggccccagtgccctttcgcggccacaagcggccgtcctcctggtccggtgctccggcgcctgatctaggttcatggagccggggctgtggctccttttcgggctcacagtgacctccgccgcaggattcgtgccttgctcccagtctggggatgctggcaggcgcggcgtgtcccaggcccccactgcagccagatctgagggggactgtgaagagactgtggctggccctggcgaggagactgtggctggccctggcgaggggactgtggccccgacagcactgcagggtccaagccctggaagccctgggcaggagcaggcggccgagggggcccctgagcaccaccgatccaggcgctgcacgtgcttcacctacaaggacaaggagtgtgtctactattgccacctggacatcatttggatcaacactcccgaacagacggtgccctatggactgtccaactacagaggaagcttccggggcaagaggtctgcggggccacttccagggaatctgcagctctcacatcggccacacttgcgctgcgcttgtgtggggagatatgacaaggcctgcctgcacttttgcacccaaactctggacgtcagcaggttgaagtcaaggaccaacaaagcaagcaggctttagacctccaccatccaaagctcatgcccggcagtggactcgccctcgctccatctacctgcccccgctgcctctttcaggaaggagccccttaggaggacaggcctgcagcatcctggtctcgggaggcttctgtcattgctcacacacagttcagatttccacctctttatagacaagaagtgaatttgcctggggcagaacacccacccaaagagtccccacttaacaataccccccccccacggcaagaatgcccaaatccgaatgaccccagttttcctaatgagtaaaatgatcccagatgtgccccagagcatgacgcctgcagctccggtttcatgcaggaaattggttttggagagttttggcaagttggaaagccacttactggcttttgacatgacttctcttggagaataagtggactccaagctaactctttgcaaatgtaaacacatgtccatcttgtaataaatgcaaaatgcccgtgcagcagaagcatgcgactttcatatccttgcctagaataggctgcatggtgtatgtcagtgagggccacgaggcgtcggctttagacacagatcatagctctacaggagtttatgaatttgaagcttatgggattttggcagagaaattttcagctgtgcttgatacccaccaaaagaatgtatctcgaaagaatgaaggaagaagaaaaaaggatccttgatgtttgtgacaagaaaatgagaaagttagtatctgcaatacagagcttgttcctgttcagtgactgaccctctgtattctgtatagacaccaggccgatacacagtggagttcccaggccttgtttgcaggaagccgactgtaaagacagccccagctcaaggctattaggttgaatatttgctttcatgagtaaatgtggatctttggggaatggcttcaaaataagtcacgaacacaaattctttgtaaattatgtaaattcctgtttatataaattggcaacaacttataccgtctgacagttcaaaatctctttcagctgcgctcttcccaccgagccgagcttactgtgagtgtggagatgttatcccaccatgtaaagtcgcctgcgcaggggagggctgcccatctccccaacccagtcacagagagataggaaacggcatttgagtgggtgtccagggccccgtagagagacatttaagatggtgtatgacagagcattggccttgaccaaatgttaaatcctctgtgtgtatttcataagttattacaggtataaaagtgatgacctatcatgaggaaatgaaagtggctgatttgctggtaggattttgtacagtttagagaagcgattatttattgtgaaactgttctccactccaactcctttatgtggatctgttcaaagtagtcactgtatatacgtatagagaggtagataggtaggtagattttaaattgcattctgaatacaaactcatactccttagagcttgaattacatttttaaaatgcatatgtgctgtttggcaccgtggcaagatggtatcagagagaaacccatcaattgctcaaatactcagaaagtactgtcaaaagcctaataaaaaacctaaagtttgctctga

SEQ ID NO: 10216 - protein, 192 aa, Homo sapiens
MEPGLWLLFGLTVTSAAGFVPCSQSGDAGRRGVSQAPTAARSEGDCEETVAGPGEETVAGPGEGTVAPTALQGPSPGSPGQEQAAEGAPEHHRSRRCTCFTYKDKECVYYCHLDIIWINTPEQTVPYGLSNYRGSFRGKRSAGPLPGNLQLSHRPHLRCACVGRYDKACLHFCTQTLDVSRLKSRTNKASRL

SEQ ID NO: 10217 - DNA, 2636 bp, Homo sapiens
cgctgtcctgggtgcgcctcgggccgctgcgctcctggccagctccccccagcgcctgggaggcgacccccagtgcgcccgggttcaaaggcccggcgaggcagttccagcccctctggggggcggggaggcgacgggggtggtgcagaagccagaaaagcccgagccacagccggccagctccgcgcagggatgggcagcgcgctctgaaagtttatgaccgccgcagccaactcctggccggagctggagacgcagcgagcgatcggccggcctcgaacccccacagctggagggcgaggccagctgtacccggccccagtgccctttcgcggccacaagcggccgtcctcctggtccggtgctccggcgcctgatctaggttcatggagccggggctgtggctccttttcgggctcacagtgacctccgccgcaggattcgtgccttgctcccagtctggggatgctggcaggcgcggcgtgtcccaggcccccactgcagccagatctgagggggactgtgaagagactgtggctggccctggcgaggagactgtggctggccctggcgaggggactgtggccccgacagcactgcagggtccaagccctggaagccctgggcaggagcaggcggccgagggggcccctgagcaccaccgatccaggcgctgcacgtgcttcacctacaaggacaaggagtgtgtctactattgccacctggacatcatttggatcaacactcccgaacagacggtgccctatggactgtccaactacagaggaagcttccggggcaagaggtctgcggggccacttccagggaatctgcagctctcacatcggccacacttgcgctgcgcttgtgtggggagatatgacaaggcctgcctgcacttttgcacccaaactctggacgtcagcagtaattcaaggacggcagaaaaaacagacaaagaagaggaagggaaggttgaagtcaaggaccaacaaagcaagcaggctttagacctccaccatccaaagctcatgcccggcagtggactcgccctcgctccatctacctgcccccgctgcctctttcaggaaggagccccttaggaggacaggcctgcagcatcctggtctcgggaggcttctgtcattgctcacacacagttcagatttccacctctttatagacaagaagtgaatttgcctggggcagaacacccacccaaagagtccccacttaacaataccccccccccacggcaagaatgcccaaatccgaatgaccccagttttcctaatgagtaaaatgatcccagatgtgccccagagcatgacgcctgcagctccggtttcatgcaggaaattggttttggagagttttggcaagttggaaagccacttactggcttttgacatgacttctcttggagaataagtggactccaagctaactctttgcaaatgtaaacacatgtccatcttgtaataaatgcaaaatgcccgtgcagcagaagcatgcgactttcatatccttgcctagaataggctgcatggtgtatgtcagtgagggccacgaggcgtcggctttagacacagatcatagctctacaggagtttatgaatttgaagcttatgggattttggcagagaaattttcagctgtgcttgatacccaccaaaagaatgtatctcgaaagaatgaaggaagaagaaaaaaggatccttgatgtttgtgacaagaaaatgagaaagttagtatctgcaatacagagcttgttcctgttcagtgactgaccctctgtattctgtatagacaccaggccgatacacagtggagttcccaggccttgtttgcaggaagccgactgtaaagacagccccagctcaaggctattaggttgaatatttgctttcatgagtaaatgtggatctttggggaatggcttcaaaataagtcacgaacacaaattctttgtaaattatgtaaattcctgtttatataaattggcaacaacttataccgtctgacagttcaaaatctctttcagctgcgctcttcccaccgagccgagcttactgtgagtgtggagatgttatcccaccatgtaaagtcgcctgcgcaggggagggctgcccatctccccaacccagtcacagagagataggaaacggcatttgagtgggtgtccagggccccgtagagagacatttaagatggtgtatgacagagcattggccttgaccaaatgttaaatcctctgtgtgtatttcataagttattacaggtataaaagtgatgacctatcatgaggaaatgaaagtggctgatttgctggtaggattttgtacagtttagagaagcgattatttattgtgaaactgttctccactccaactcctttatgtggatctgttcaaagtagtcactgtatatacgtatagagaggtagataggtaggtagattttaaattgcattctgaatacaaactcatactccttagagcttgaattacatttttaaaatgcatatgtgctgtttggcaccgtggcaagatggtatcagagagaaacccatcaattgctcaaatactcagaaagtactgtcaaaagcctaataaaaaacctaaagtttgctctga

SEQ ID NO: 10218 - protein, 238 aa, Homo sapiens; identical to SEQ ID NO: 1289

SEQ ID NO: 10219 - DNA, 2671 bp, Homo sapiens
cgctgtcctgggtgcgcctcgggccgctgcgctcctggccagctccccccagcgcctgggaggcgacccccagtgcgcccgggttcaaaggcccggcgaggcagttccagcccctctggggggcggggaggcgacgggggtggtgcagaagccagaaaagcccgagccacagccggccagctccgcgcagggatgggcagcgcgctctgaaagtttatgaccgccgcagccaactcctggccggagctggagacgcagcgagcgatcggccggcctcgaacccccacagctggagggcgaggccagctgtacccggccccagtgccctttcgcggccacaagcggccgtcctcctggtccggtgctccggcgcctgatctaggttcatggagccggggctgtggctccttttcgggctcacagtgacctccgccgcaggattcgtgccttgctcccagtctggggatgctggcaggcgcggcgtgtcccaggcccccactgcagccagatctgagggggactgtgaagagactgtggctggccctggcgaggagactgtggctggccctggcgaggggactgtggccccgacagcactgcagggtccaagccctggaagccctgggcaggagcaggcggccgagggggcccctgagcaccaccgatccaggcgctgcacgtgcttcacctacaaggacaaggagtgtgtctactattgccacctggacatcatttggatcaacactcccgaacagacggtgccctatggactgtccaactacagaggaagcttccggggcaagaggtctgcggggccacttccagggaatctgcagctctcacatcggccacacttgcgctgcgcttgtgtggggagatatgacaaggcctgcctgcacttttgcacccaaactctggacgtcagcagtaattcaaggacggcagaaaaaacagacaaagaagaggaagggaaggtgagaggtgccaacagaggcctgtgtcaaaggaggttgaagtcaaggaccaacaaagcaagcaggctttagacctccaccatccaaagctcatgcccggcagtggactcgccctcgctccatctacctgcccccgctgcctctttcaggaaggagccccttaggaggacaggcctgcagcatcctggtctcgggaggcttctgtcattgctcacacacagttcagatttccacctctttatagacaagaagtgaatttgcctggggcagaacacccacccaaagagtccccacttaacaataccccccccccacggcaagaatgcccaaatccgaatgaccccagttttcctaatgagtaaaatgatcccagatgtgccccagagcatgacgcctgcagctccggtttcatgcaggaaattggttttggagagttttggcaagttggaaagccacttactggcttttgacatgacttctcttggagaataagtggactccaagctaactctttgcaaatgtaaacacatgtccatcttgtaataaatgcaaaatgcccgtgcagcagaagcatgcgactttcatatccttgcctagaataggctgcatggtgtatgtcagtgagggccacgaggcgtcggctttagacacagatcatagctctacaggagtttatgaatttgaagcttatgggattttggcagagaaattttcagctgtgcttgatacccaccaaaagaatgtatctcgaaagaatgaaggaagaagaaaaaaggatccttgatgtttgtgacaagaaaatgagaaagttagtatctgcaatacagagcttgttcctgttcagtgactgaccctctgtattctgtatagacaccaggccgatacacagtggagttcccaggccttgtttgcaggaagccgactgtaaagacagccccagctcaaggctattaggttgaatatttgctttcatgagtaaatgtggatctttggggaatggcttcaaaataagtcacgaacacaaattctttgtaaattatgtaaattcctgtttatataaattggcaacaacttataccgtctgacagttcaaaatctctttcagctgcgctcttcccaccgagccgagcttactgtgagtgtggagatgttatcccaccatgtaaagtcgcctgcgcaggggagggctgcccatctccccaacccagtcacagagagataggaaacggcatttgagtgggtgtccagggccccgtagagagacatttaagatggtgtatgacagagcattggccttgaccaaatgttaaatcctctgtgtgtatttcataagttattacaggtataaaagtgatgacctatcatgaggaaatgaaagtggctgatttgctggtaggattttgtacagtttagagaagcgattatttattgtgaaactgttctccactccaactcctttatgtggatctgttcaaagtagtcactgtatatacgtatagagaggtagataggtaggtagattttaaattgcattctgaatacaaactcatactccttagagcttgaattacatttttaaaatgcatatgtgctgtttggcaccgtggcaagatggtatcagagagaaacccatcaattgctcaaatactcagaaagtactgtcaaaagcctaataaaaaacctaaagtttgctctga

SEQ ID NO: 10220 - protein, 219 aa, Homo sapiens; identical to SEQ ID NO: 1291

SEQ ID NO: 10221 - DNA, 2415 bp, Homo sapiens
cgctgtcctgggtgcgcctcgggccgctgcgctcctggccagctccccccagcgcctgggaggcgacccccagtgcgcccgggttcaaaggcccggcgaggcagttccagcccctctggggggcggggaggcgacgggggtggtgcagaagccagaaaagcccgagccacagccggccagctccgcgcagggatgggcagcgcgctctgaaagtttatgaccgccgcagccaactcctggccggagctggagacgcagcgagcgatcggccggcctcgaacccccacagctggagggcgaggccagctgtacccggccccagtgccctttcgcggccacaagcggccgtcctcctggtccggtgctccggcgcctgatctaggttcatggagccggggctgtggctccttttcgggctcacagtgacctccgccgcaggattcgtgccttgctcccagtctggggatgctggcaggcgcggcgtgtcccaggcccccactgcagccagatctgagggggactgtgaagagactgtggctggccctggcgaggagactgtggctggccctggcgaggggactgtggccccgacagcactgcagggtccaagccctggaagccctgggcaggagcaggcggccgagggggcccctgagcaccaccgatccaggcgctgcacgtgcttcacctacaaggacaaggagtgtgtctactattgccacctggacatcatttggatcaacactcccgaacagacggtgccctatggactgtccaactacagaggaagcttccggggcaagaggtctgcggggccacttccagggaatctgcagctctcacatcggccacacttgcgctgcgcttgtgtggggagatatgacaaggcctgcctgcacttttgcacccaaactctggacgtcagcagtaattcaaggacggcagaaaaaacagacaaagaagaggaagggaaggttgaagtcaaggaccaacaaagcaagcaggctttagacctccaccatccaaagctcatgcccggcagtggactcgccctcgctccatctacctgcccccgctgcctctttcaggaaggagccccttaggaggacaggcctgcactccggtttcatgcaggaaattggttttggagagttttggcaagttggaaagccacttactggcttttgacatgacttctcttggagaataagtggactccaagctaactctttgcaaatgtaaacacatgtccatcttgtaataaatgcaaaatgcccgtgcagcagaagcatgcgactttcatatccttgcctagaataggctgcatggtgtatgtcagtgagggccacgaggcgtcggctttagacacagatcatagctctacaggagtttatgaatttgaagcttatgggattttggcagagaaattttcagctgtgcttgatacccaccaaaagaatgtatctcgaaagaatgaaggaagaagaaaaaaggatccttgatgtttgtgacaagaaaatgagaaagttagtatctgcaatacagagcttgttcctgttcagtgactgaccctctgtattctgtatagacaccaggccgatacacagtggagttcccaggccttgtttgcaggaagccgactgtaaagacagccccagctcaaggctattaggttgaatatttgctttcatgagtaaatgtggatctttggggaatggcttcaaaataagtcacgaacacaaattctttgtaaattatgtaaattcctgtttatataaattggcaacaacttataccgtctgacagttcaaaatctctttcagctgcgctcttcccaccgagccgagcttactgtgagtgtggagatgttatcccaccatgtaaagtcgcctgcgcaggggagggctgcccatctccccaacccagtcacagagagataggaaacggcatttgagtgggtgtccagggccccgtagagagacatttaagatggtgtatgacagagcattggccttgaccaaatgttaaatcctctgtgtgtatttcataagttattacaggtataaaagtgatgacctatcatgaggaaatgaaagtggctgatttgctggtaggattttgtacagtttagagaagcgattatttattgtgaaactgttctccactccaactcctttatgtggatctgttcaaagtagtcactgtatatacgtatagagaggtagataggtaggtagattttaaattgcattctgaatacaaactcatactccttagagcttgaattacatttttaaaatgcatatgtgctgtttggcaccgtggcaagatggtatcagagagaaacccatcaattgctcaaatactcagaaagtactgtcaaaagcctaataaaaaacctaaagtttgctctga

SEQ ID NO: 10222 - protein, 238 aa, Homo sapiens; identical to SEQ ID NO: 1289

SEQ ID NO: 10223 - DNA, 620 bp, Homo sapiens
agactcacaaagtgtcactgctgagcgggctccacagcactgcctctcatgcattcatgcactcacgtgacctactccgtgccaggccaggggctcggtgtggagatgcagggctggaagagcacatcctggtgcagcaggcagttcgtaagcaggaattcaaatctcctctgtgcctttgcaaagcaacatccatcttgaacataaatgaggttctggcttgatttctgggcttgggcatcagacatctcccttttgcggacacctacagctctgttcttgaattttgtgattgcggataagcacccgctccttctttttaagtcctttggcagatagtcattcatgcttacaggatgacccaggcaaagctaaacacagatctgggctccaatcccaccatggctgtgtgacctagtggaagttccttaacctctctgagcctcagctttcttttccacagattgctgattaaaacacttactttagtgttaacacaagggaaagctgggcgtggaggtctatgagaattctctatactatttttgcaactcttttgtgaatatgaaataatctaaactagaagatttaaaaaaaaaaacaaacccaaacacgtgctt

SEQ ID NO: 10224 - protein, 55 aa, Homo sapiens
MHSRDLLRARPGARCGDAGLEEHILVQQAVRKQEFKSPLCLCKATSILNINEVLA

SEQ ID NO: 10225 - DNA, 630 bp, Homo sapiens
atggggagcatggcctctgtgaagaagctgcaggtggctggtttggctggtctcaaggccatgcctaggggtcacaaggtgttgctgttgatctgccccagggccagatactgggacttgggagctgaagccaaggctgactccaagatgctctgtgcatctcaaaacccagccctcagagccatgagctgtaccagcacctccatatctgttcccgtcgaaggggagggtatcaccatcgcccgagtcacccacatcacaagcccaggccccatctcggacccctccaccatgttctgccagtgtggtgtccactgctcttcctttgcaccccactgcctcatctcagacctggatgatggccacagccttttagttccagatgccagggtgtgggccgagggggtcacactggtcacgggcaagtccatgtgcagcttcttcagcgagatctcacactccatcacactggaggagctgccatgcagggaccacatcctcaagctctgccaggacatcttcctggcgtgcgagacccatgagctggagctggaggaggagctgtctgccaagctcatcttcctctatcgctcactggagaccatgatcaagtggactcgtgaggagtag

SEQ ID NO: 10226 - protein, 209 aa, Homo sapiens
MGSMASVKKLQVAGLAGLKAMPRGHKVLLLICPRARYWDLGAEAKADSKMLCASQNPALRAMSCTSTSISVPVEGEGITIARVTHITSPGPISDPSTMFCQCGVHCSSFAPHCLISDLDDGHSLLVPDARVWAEGVTLVTGKSMCSFFSEISHSITLEELPCRDHILKLCQDIFLACETHELELEEELSAKLIFLYRSLETMIKWTREE

SEQ ID NO: 10227 - DNA, 549 bp, Homo sapiens
atggggagcatggcctctgtgaagaagctgcaggtggctggagctgaagccaaggctgactccaagatgctctgtgcatctcaaaacccagccctcagagccatgagctgtaccagcacctccatatctgttcccgtcgaaggggagggtatcaccatcgcccgagtcacccacatcacaagcccaggccccatctcggacccctccaccatgttctgccagtgtggtgtccactgctcttcctttgcaccccactgcctcatctcagacctggatgatggccacagccttttagttccagatgccagggtgtgggccgagggggtcacactggtcacgggcaagtccatgtgcagcttcttcagcgagatctcacactccatcacactggaggagctgccatgcagggaccacatcctcaagctctgccaggacatcttcctggcgtgcgagacccatgagctggagctggaggaggagctgtctgccaagctcatcttcctctatcgctcactggagaccatgatcaagtggactcgtgaggagtag

SEQ ID NO: 10228 - protein, 182 aa, Homo sapiens
MGSMASVKKLQVAGAEAKADSKMLCASQNPALRAMSCTSTSISVPVEGEGITIARVTHITSPGPISDPSTMFCQCGVHCSSFAPHCLISDLDDGHSLLVPDARVWAEGVTLVTGKSMCSFFSEISHSITLEELPCRDHILKLCQDIFLACETHELELEEELSAKLIFLYRSLETMIKWTREE

SEQ ID NO: 10229 - DNA, 3337 bp, Homo sapiens
ggcggggcctcggcggggcggccgcggcttcacctgcagctccgagcgcgcggaacagaggcgcgggcggctgcgaggccggcggacgcaccggcccgagggaacgcgccgccggccggacttggcctggctcccggagccggggcggcgagcgcggcgggcgcagcggggctggaggctccgggcaggcgcgggggagcggcggcggcggcggcgatcggagcggcggcggtggtctcggcggcggcggcggcggcggcggcagggagcgggctcccggtgccgggcaccgggcgggcggcggggaagatgaccgcgggcgccggcgtgctccttctgctgctctcgctctccggcgcgctccgggcccataatgaggatcttacaactagagagacctgcaaggctgggttctctgaagatgattacacggcattaatctcccaaaatattctagaaggggaaaagctacttcaagtcaagttcagcagctgtgtggggaccaaggggacacaatatgagaccaacagcatggacttcaaagttggggcagatgggacagtcttcgccacccgggagctgcaggtcccctccgagcaggtggcgttcacggtgactgcatgggacagccagacagcagagaaatgggacgccgtggtgcggttgctggtggcccagacctcgtccccgcactctggacacaagccgcagaaaggaaagaaggtcgtggctctggacccctctccgcctccgaaggacaccctgctgccgtggccccagcaccagaacgccaacgggctgaggcggcgcaaacgggactgggtcatcccgcccatcaacgtgcccgagaactcgcgcgggcccttcccgcagcagctcgtgaggatccggtccgacaaagacaatgacatccccatccggtacagcatcacgggagtgggcgccgaccagccccccatggaggtcttcagcattgactccatgtccggccggatgtacgtcacaaggcccatggaccgggaggagcacgcctcttaccacctccgagcccacgctgtggacatgaatggcaacaaggtggagaaccccatcgacctgtacatctacgtcatcgacatgaatgacaaccgccctgagttcatcaaccaggtctacaacggctccgtggacgagggctccaagccaggcacctacgtgatgaccgtcacggccaacgatgctgacgacagcaccacggccaacgggatggtgcggtaccggatcgtgacccagaccccacagagcccgtcccagaatatgttcaccatcaacagcgagactggagatatcgtcacagtggcggctggcctggaccgagagaaagttcagcagtacacagtcatcgttcaggccacagatatggaaggaaatctcaactatggcctctcaaacacagccacagccatcatcacggtgacagatgtgaatgacaacccgccagaatttaccgccagcacgtttgcaggggaggtccccgaaaaccgcgtggagaccgtggtcgcaaacctcacggtgatggaccgagatcagccccactctccaaactggaatgccgtttaccgcatcatcagtggggatccatccgggcacttcagcgtccgcacagaccccgtaaccaacgagggcatggtcaccgtggtgaaggcagtcgactacgagctcaacagagctttcatgctgacagtgatggtgtccaaccaggcgcccctggccagcggaatccagatgtccttccagtccacggcaggggtgaccatctccatcatggacatcaacgaggctccctacttcccctcaaaccacaagctgatccgcctggaggagggcgtgccccccggcaccgtgctgaccacgttttcagctgtggaccctgaccggttcatgcagcaggctgtgagatactcaaagctgtcagacccagcgagctggctgcacatcaatgccaccaacggccagatcaccacggcggcagtgctggaccgtgagtccctctacaccaaaaacaacgtctacgaggccaccttcctggcagctgacaatgggatacccccggccagcggcaccgggaccctccagatctatctcattgacatcaacgacaacgcccctgagctgctgcccaaggaggcgcagatctgcgagaagcccaacctgaacgccatcaacatcacggcggccgacgctgacgtcgaccccaacatcggcccctacgtcttcgagctgccctttgtcccggcggccgtgcggaagaactggaccatcacccgcctgaacggtgactatgcccaactcagcttgcgcatcctgtacctggaggccgggatgtatgacgtccccatcatcgtcacagactctggaaaccctcccctgtccaacacgtccatcatcaaagtcaaggtgtgcccatgtgatgacaacggggactgcaccaccattggcgcagtggcagcggctggtctgggcaccggtgccatcgtggccatcctcatctgcatcctcatcctgctgaccatggtcctgctgtttgtcatgtggatgaagcggcgagagaaggagcgccacacgaagcagctgctcattgaccccgaggacgacgtccgcgacaacatcctcaagtatgacgaggaaggcggtggcgaggaggaccaggactacgacctcagccagctgcagcagccggaagccatggggcacgtgccaagcaaagcccctggcgtgcgtcgcgtggatgagcggccggtgggcgctgagccccagtacccgatcaggcccatggtgccgcacccaggcgacatcggtgacttcatcaatgagggactccgcgctgctgacaacgaccccacggcacccccctatgactccctgctggtcttcgactacgaggggagcggctccaccgcaggctccgtcagctccctgaactcatccagttccggggaccaagactacgattacctcaacgactgggggcccagattcaagaagctggcggacatgtatggaggtggtgaagaggattgactgacctcgcatcttcggaccgaagtgagagccgtgctcggacgccggaggagcaggactgagcagaggcggccggtcttcccgactccctgcggctgtgtccttagtgctgttaggaggccccccaatccccacgttgagctgtctagcatgagcacccacccccacagcgccctgcacccggccgctgcccagcaccgcgctggctggcactgaaggacagcaagaggcactctgtcttcacttgaatttcctagaacagaagcactgtttttaa

SEQ ID NO: 10230 - protein, 916 aa, Homo sapiens; identical to SEQ ID NO: 1299

SEQ ID NO: 10231 - DNA, 637 bp, Homo sapiens
cgtttttgctgcgtcacagggagacagaagatgggctgctatttcgtcggctaaatgctatcattttaagcaccgttccaaagaaaacagggatcttgccagaggaaaataacatataccataaaggaaaaagaaatgtgcatcaaggcaaataaacagctctctactaagggcctaggatcttgctagacgagtcatttctctggttgaaaagcagttgagaaaggcaagacaaggggggcgggggcccagcagggcacctctgagcccttcctgctgctcttcaaagacagacgcattttcctttctacggtctccttgcaagtcttctgtaggccctgccaccttcaggctgactgactgcctccttcaaatatcagcatttggggccccatgaaggcaggcagcccagggaggaatgactggacggtgacattgtgcagggggtctggaagttgccagcgcaggggttagcagctgcagcctggcctggtcctgtctgcctggctgtcaaacccagaagaccgtggtttctggtggcctctgtgtgacagcggaggaggtggggcgaggcctggaagtgaagcatctcgtgagccacttaagtgtttatgaagctcgctaatgtgcttaaatg

SEQ ID NO: 10232 - protein, 72 aa, Homo sapiens
DLARRVISLVEKQLRKARQGGRGPSRAPLSPSCCSSKTDAFSFLRSPCKSSVGPATFRLTDCLLQISAFGAP

SEQ ID NO: 10233 - DNA, 663 bp, Homo sapiens
gattacaactgctcttaggatgaagtgactggagcccagataccttatttagcaatcagtgctcggcacaaggacttgctgtgccaacgaaaaggaagcgaggcattttggctagtcaccgcgtttttgctgcgtcacagggagacagaagatgggctgctatttcgtcggctaaatgctatcattttaagcaccgttccaaagaaaacagggatcttgccagaggaaaataacatataccataaaggaaaaagaaatgtgcatcaaggcaaataaacagctctctactaagggcctaggatcttgctagacgagtcatttctctggttgaaaagcagttgagaaaggcaagacaaggggggcgggggcccagcagggcacctctgagcccttcctgctgctcttcaaagacagacgcattttcctttctacggtctccttgcaagtcttctgtaggccctgccaccttcaggctgactgactgcctccttcaaatatcagcatttggaagggtactggggagtcgacaccctcatgtctgtgagctgactgcaggacgtctcctgtccaggtgctggcacctcatctaacatttgaaggtaaaagcagctctggcctcctgcaggtgcaaggacccgggagccgctctgtgggctgggctca

SEQ ID NO: 10234 - protein, 96 aa, Homo sapiens
DLARRVISLVEKQLRKARQGGRGPSRAPLSPSCCSSKTDAFSFLRSPCKSSVGPATFRLTDCLLQISAFGRVLGSRHPHVCELTAGRLLSRCWHLI

SEQ ID NO: 10235 - DNA, 608 bp, Homo sapiens
aactgctcttaggatgaagtgactggagcccagataccttatttagcaatcagtgctcggcacaaggacttgctgtgccaacgaaaaggaagcgaggcattttggctagtcaccgcgtttttgctgcgtcacagggagacagaagatgggctgctatttcgtcggctaaatgctatcattttaagcaccgttccaaagaaaacagggatcttgccagaggaaaataacatataccataaaggaaaaagaaatgtgcatcaaggcaaataaacagctctctactaagggcctaggatcttgctagacgagtcatttctctggttgaaaagcagttgagaaaggcaagacaaggggggcgggggcccagcagggcacctctgagcccttcctgctgctcttcaaagacagacgcattttcctttctacggtctccttgcaagtcttctgtaggccctgccaccttcaggctgactgactgcctccttcaaatatcagcatttgatggatgtgctggaaggagacccctgctgacccctgctgactccatgacagagggatggaaattctgcccctcccagacctcaccctatgcgttctgtttcctttat

SEQ ID NO: 10236 - protein, 85 aa, Homo sapiens
DEVTGAQIPYLAISARHKDLLCQRKGSEAFWLVTAFLLRHRETEDGLLFRRLNAIILSTVPKKTGILPEENNIYHKGKRNVHQGK

SEQ ID NO: 10237 - DNA, 3347 bp, Homo sapiens
gctaacgataaagaaagaatcagaataaaatgtacctgccatccagttttggatctttttaaaactaatgagtatgaacttgagatctgtataaataagagcatgatttgaaaaaaagcatggtataattgaaacttttttcattttgaaaagtattggttactggtgatgttgaaatatgcatactaatttttgcttaacattagatgtcatgaggaaactactgaactagcaattggttgtttaacacttctgtatgcatcagataacaactgtgagtagcctatgaatgaaattcttttataaatattaggcataaattaaaatgtaaaactccattcatagtggattaatgcattttgctgcctttattagggtactttattttgcttttcagaagtcagcctacataacacatttttaaagtctaaactgttaaacaactctttaaaggataattatccaataaaaaaaaacctagtgctgattcacagcttattatccaattcaaaaataaattagaaaaatatatgcttacatttttcacttttgctaaaaagaaaaaaaaaaggtgtttatttttaactcttggaagaggttttgtggttcccaatgtgtctgtcccaccctgatccttttcaatatatatttctttaaaccttgtgctacttagtaaaaattgattacaattgagggaagtttgatagatcctttaaaaaaaaggcagatttccattttttgtattttaactactttactaaattaatactcctccttttacagaattagaaaagttaacatttatctttaggtggtttcctgaaaagttgaatatttaagaaattgtttttaacagaagcaaaatggcttttctttggacagttttcaccatctcttgtaaaagttaattctcaccattcctgtggtacctgcgagtgttatgaccaggattccttaaacctgaatgacttatgactttcctcagaacatgagactgtaaaacaaaaacaaaaaactatgtgatgcctctattttccccaatacagtcacacatcagctcaaaatttgcaatattgtagttcatatattaccgttatgtctttggaaatcgggttcagaacactttttatgacaaaaattgggtggaggggataactttcatatctggctcaacatctcaggaaaatctgtgattatttgtgtgttctaatgagtaacatctacttagttagccttagggatggaaaaacagggccacttaccaaactcaggtgattccaggatggtttggaaacttctcctgaatgcatccttaacctttattaaaaccattgtcctaagaacaatgccaacaaagcttacaacatttagtttaaacccaagaagggcactaaactcagattgactaaataaaaagtacaaagggcacatatacgtgacagaattgtacacaatcactccattggatcttttactttaaagtagtgatgaaaagtacatgttgatactgtcttagaagaaattaatatattagtgaagccacatggggtttcagttgcgaaacaggtctgtttttatgttcagtttgtacaatccacaattcattcaccagatattttgttcttaattgtgaaccaggttagcaaatgacctatcaaaaattattctataatcactactagttaggatattgatttaaaattgttctacttgaagtggtttctaagatttttatattaaaaataggtgtgatttcctaatatgatctaaaaccctaaatggttatttttcctcagaatgatttgtaaatagctactggaaatattatacagtaataggagtgggtattatgcaacatcatggagaagtgaaggcataggcttattctgacataaaattccactggccagttgaatatattctattccatgtccatactatgacaatcttattgtcaacactatataaataagcttttaaacaagtcatttttcttgatcgttgtggaaggtttggagccttagaggtatgtcagaaaaaatatgttggtattctcccttgggtagggggaaatgacctttttacaagagagtgaaatttaggtcagggaaaagaccaagggccagcattgctacttttgtgtgtgtgtgtgtgggttttgttttgtttttttggttggctggttgttttcgttgttgttaacaaaggaatgagaatatgtaatacttaaataaacatgaccacgaagaatgctgttctgatttactagagaatgttcccaatttgaatttagggtgattttaaagaacagtgagaaagggcatacatccacagattcactttgtttatgcatatgtagatacaaggatgcacatatacacattttcaaggactattttagatatctagacaatttcttctaataaagtcatttgtgaaagggtactacagcttattgacatcagtaaggtagcattcattacctgtttattctctgctgcatcttacagaagagtaaactggtgagagtatatattttatatatatatatatatatatatatataatatgtatatatatatatattgacttgttacatgaagatgttaaaatcggtttttaaaggtgatgtaaatagtgatttccttaatgaaaaatacatattttgtattgttctaatgcaacagaaaagccttttaatctctttggttcctgtatattccatgtataagtgtaaatataatcagacaggtttaaaagttgtgcatgtatgtatacagttgcaagtctggacaaatgtatagaataaaccttttatttaagttgtgattacctgctgcatgaaaagtgcatgggggaccctgtgcatctgtgcatttggcaaaatgtcttaacaaatcagatcagatgttcatcctaacatgacagtattccatttctggacatgacgtctgtggtttaagctttgtgaaagaatgtgctttgattcgaagggtcttaaagaatttttttaatcgtcaaccacttttaaacataaagaattcacacaactactttcatgaattttttaatcccattgcaaacattattccaagagtatcccagtattagcaatactggaatataggcacattaccattcatagtaagaattctggtgtttacacaaccaaatttgatgcgatctgctcagtaatataatttgccatttttattagaaatttaatttcttcatgtgatgtcatgaaactgtacatactgcagtgtgaatttttttgttttgttttttaatcttttagtgtttacttcctgcagtgaatttgaataaatgagaaaaaatgcattgtc

SEQ ID NO: 10238 - protein, 68 aa, Homo sapiens [sequence omitted]

SEQ ID NO: 10239 - DNA, 1325 bp, Homo sapiens
agggaggcttcatctgctgaaagtgtctcacaggtcacagccaaagaagagttacttcctactgcagaaacgaaagcttctttctttaatttaagaagcccttacaatagccatatgggaaataatgcttctcgcccacacagcgcaaatggagaagtttatggacttctgggaagcgtgctaacgataaagaaagaatcagaataaaatgtacctgccatccagttttggatctttttaaaactaatgagtatgaacttgagatctgtataaataagagcatgatttgaaaaaaagcatggtataattgaaacttttttcattttgaaaagtattggttactggtgatgttgaaatatgcatactaatttttgcttaacattagatgtcatgaggaaactactgaactagcaattggttgtttaacacttctgtatgcatcagataacaactgtgagtagcctatgaatgaaattcttttataaatattaggcataaattaaaatgtaaaactccattcatagtggattaatgcattttgctgcctttattagggtactttattttgcttttcagaagtcagcctacataacacatttttaaagtctaaactgttaaacaactctttaaaggataattatccaataaaaaaaaacctagtgctgattcacagcttattatccaattcaaaaataaattagaaaaatatatgcttacatttttcacttttgctaaaaagaaaaaaaaaaggtgtttatttttaactcttggaagaggttttgtggttcccaatgtgtctgtcccaccctgatccttttcaatatatatttctttaaaccctgtgcatctgtgcatttggcaaaatgtcttaacaaatcagatcagatgttcatcctaacatgacagtattccatttctggacatgacgtctgtggtttaagctttgtgaaagaatgtgctttgattcgaagggtcttaaagaatttttttaatcgtcaaccacttttaaacataaagaattcacacaactactttcatgaattttttaatcccattgcaaacattattccaagagtatcccagtattagcaatactggaatataggcacattaccattcatagtaagaattctggtgtttacacaaccaaatttgatgcgatctgctcagtaatataatttgccatttttattagaaatttaatttcttcatgtgatgtcatgaaactgtacatactgcagtgtgaatttttttgttttgttttttaatcttttagtgtttacttcctgcagtgaatttgaataaatgagaaaaaatgcattgtc

SEQ ID NO: 10240 - protein, 33 aa, Homo sapiens
MLTFFTFAKKKKKRCLFLTLGRGFVVPNVSVPP

SEQ ID NO: 10241 - DNA, 7292 bp, Homo sapiens; identical to SEQ ID NO: 1300

SEQ ID NO: 10242 - protein, 1158 aa, Homo sapiens; identical to SEQ ID NO: 1301

SEQ ID NO: 10243 - DNA, 7483 bp, Homo sapiens
agttgtggttatctcagcagaagacataccgccctcctccttgtattggtcgggacctgggcattagggagtcaaggcaaaggagaaagaaaagagattttacattagtattctatgaaagccttacggtctgcagaacaaattgattactccggtgtacctgtgcttggcaccactgctgtgagagaaagaacactgatatttgcatttaatggggaacaaaagatgaagaaggaaaaggaatatattcactaaggattctatctgcttactgctacagacctatgtgttaaggaattcttctcctcctccttgcgtagaagttgatcagcactgtggtcagactgcatttatcttgtcattgccagaagaaatcttggacagaatgtaacagtacgtctctctctgattgcgatggaaggtgataaactgatactcctttattaaagttacatcgcactcaccacagaaaaccattctttaaagtgaatagaaaccaagcccttgtgaacacttctattgaacatgactcatggagaagagcttggctctgatgtgcaccaggattctattgttttaacttacctagaaggattactaatgcatcaggcagcagggggatcaggtactgccgttgacaaaaagtctgctgggcataatgaagaggatcagaactttaacatttctggcagtgcatttcccacctgtcaaagtaatggtccagttctcaatacacatacatatcaggggtctggcatgctgcacctcaaaaaagccagactgttgcagtcttctgaggactggaatgcagcaaagcggaagaggctgtctgattctatcatgaatttaaacgtaaagaaggaagctttgctagctggcatggttgacagtgtgcctaaaggcaaacaggatagcacattactggcctctttgcttcagtcattcagctctaggctgcagactgttgctctgtcacaacaaatcaggcagagcctcaaggagcaaggatatgccctcagtcatgattctttaaaagtggagaaggatttaaggtgctatggtgttgcatcaagtcacttaaaaactttgttgaagaaaagtaaagttaaagatcaaaagcctgatacgaatcttcctgatgtgactaaaaacctcatcagagataggtttgcagagtctcctcatcatgttggacaaagtggaacaaaggtcatgagtgaaccgttgtcatgtgctgcaagattacaggctgttgcaagcatggtggaaaaaagggctagtcctgccacctcacctaaacctagtgttgcttgtagccagttagcattacttctgtcaagcgaagcccatttgcagcagtattctcgagaacacgctttaaaaacgcaaaatgcaaatcaagcagcaagtgaaagacttgctgctatggccagattgcaagaaaatggccagaaggatgttggcagttaccagctcccaaaaggaatgtcaagccatcttaatggtcaggcaagaacatcatcaagcaaactgatggctagcaaaagtagtgctacagtgtttcaaaatccaatgggtatcattccttcttcccctaaaaatgcaggttataagaactcactggaaagaaacaatataaaacaagctgctaacaatagtttgcttttacatcttcttaaaagccagactatacctaagccaatgaatggacacagtcacagtgagagaggaagcatttttgaggaaagtagtacacctacaactattgatgaatattcagataacaatcctagttttacagatgacagcagtggtgatgaaagttcttattccaactgtgttcccatagacttgtcttgcaaacaccgaactgaaaaatcagaatctgaccaacctgtttccctggataacttcactcaatccttgctaaacacttgggatccaaaagtcccagatgtagatatcaaagaagatcaagatacctcaaagaattctaagctaaactcacaccagaaagtaacacttcttcaattgctacttggccataagaatgaagaaaatgtagaaaaaaacaccagccctcagggagtacacaatgatgtgagcaagttcaatacacaaaattatgcaaggacttctgtgatagaaagccccagtacaaatcggactactccagtgagcactccacctttacttacatcaagcaaagcagggtctcccatcaatctctctcaacactctctggtcatcaaatggaattccccaccatatgtctgcagtactcagtctgaaaagctaacaaatactgcatctaaccactcaatggaccttacaaaaagcaaagacccaccaggagagaaaccagcccaaaatgaaggtgcacagaactctgcaacgtttagtgccagtaagctgttacaaaatttagcacaatgtggaatgcagtcatccatgtcagtggaagagcagagacccagcaaacagctgttaactggaaacacagataaaccgataggtatgattgatagattaaatagccctttgctctcaaataaaacaaatgcagttgaagaaaataaagcatttagtagtcaaccaacaggtcctgaaccagggctttctggttctgaaatagaaaatctgcttgaaagacgtactgtcctccagttgctcctggggaaccccaacaaagggaagagtgaaaaaaaagagaaaactcccttaagagatgaaagtactcaggaacactcagagagagctttaagtgaacaaatactgatggtgaaaataaaatctgagccttgtgatgacttacaaattcctaacacaaatgtgcacttgagccatgatgctaagagtgccccattcttgggtatggctcctgctgtgcagagaagcgcacctgccttaccagtgtccgaagactttaaatcggagcctgtttcacctcaggatttttctttctccaagaatggtctgctaagtcgattgctaagacaaaatcaagatagttacctggcagatgattcagacaggagtcacagaaataatgaaatggcacttctagaatcaaagaatctttgcatggtccctaagaaaaggaagctttatactgagccattagaaaatccatttaaaaagatgaaaaacaacattgttgatgctgcaaacaatcacagtgccccagaagtactgtatgggtccttgcttaaccaggaagagctgaaatttagcagaaatgatcttgaatttaaatatcctgctggtcatggctcagccagcgaaagtgaacacaggagttgggccagagagagcaaaagctttaatgttctgaaacagctgcttctctcagaaaactgtgtgcgagatttgtccccgcacagaagtaactctgtggctgacagtaaaaagaaaggacacaaaaataatgtgaccaacagcaaacctgaatttagcatttcttctttaaatggactgatgtacagttccactcagcccagcagttgcatggataacaggacattttcatacccaggtgtagtaaaaactcctgtgagtcctactttccctgagcacttgggctgtgcagggtctagaccagaatctgggcttttgaatgggtgttccatgcccagtgagaaaggacccattaagtgggttatcactgatgcggagaagaatgagtatgaaaaagactctccaagattgaccaaaaccaacccaatactatattacatgcttcaaaaaggaggcaattctgttaccagtcgagaaacacaagacaaggacatttggagggaggcttcatctgctgaaagtgtctcacaggtcacagccaaagaagagttacttcctactgcagaaacgaaagcttctttctttaatttaagaagcccttacaatagccatatgggaaataatgcttctcgcccacacagcgcaaatggagaagtttatggacttctgggaagcgtgctaacgataaagaaagaatcagaataaaatgtacctgccatccagttttggatctttttaaaactaatgagtatgaacttgagatctgtataaataagagcatgatttgaaaaaaagcatggtataattgaaacttttttcattttgaaaagtattggttactggtgatgttgaaatatgcatactaatttttgcttaacattagatgtcatgaggaaactactgaactagcaattggttgtttaacacttctgtatgcatcagataacaactgtgagtagcctatgaatgaaattcttttataaatattaggcataaattaaaatgtaaaactccattcatagtggattaatgcattttgctgcctttattagggtactttattttgcttttcagaagtcagcctacataacacatttttaaagtctaaactgttaaacaactctttaaaggataattatccaataaaaaaaaacctagtgctgattcacagcttattatccaattcaaaaataaattagaaaaatatatgcttacatttttcacttttgctaaaaagaaaaaaaaaaggtgtttatttttaactcttggaagaggttttgtggttcccaatgtgtctgtcccaccctgatccttttcaatatatatttctttaaaccttgtgctacttagtaaaaattgattacaattgagggaagtttgatagatcctttaaaaaaaaggcagatttccattttttgtattttaactactttactaaattaatactcctccttttacagaattagaaaagttaacatttatctttaggtggtttcctgaaaagttgaatatttaagaaattgtttttaacagaagcaaaatggcttttctttggacagttttcaccatctcttgtaaaagttaattctcaccattcctgtggtacctgcgagtgttatgaccaggattccttaaacctgaactcagaccacttgcattagaaccatctggagcacttgttttaaaatgcagattcataggcagcatctcagatctacagaacaagaatctctgctaagtggacctggaatcttccatctgcatcttaacatgctctctaggtgtttcttgtgtttgagaaccatgacttatgactttcctcagaacatgagactgtaaaacaaaaacaaaaaactatgtgatgcctctattttccccaatacagtcacacatcagctcaaaatttgcaatattgtagttcatatattaccgttatgtctttggaaatcgggttcagaacactttttatgacaaaaattgggtggaggggataactttcatatctggctcaacatctcaggaaaatctgtgattatttgtgtgttctaatgagtaacatctacttagttagccttagggatggaaaaacagggccacttaccaaactcaggtgattccaggatggtttggaaacttctcctgaatgcatccttaacctttattaaaaccattgtcctaagaacaatgccaacaaagcttacaacatttagtttaaacccaagaagggcactaaactcagattgactaaataaaaagtacaaagggcacatatacgtgacagaattgtacacaatcactccattggatcttttactttaaagtagtgatgaaaagtacatgttgatactgtcttagaagaaattaatatattagtgaagccacatggggtttcagttgcgaaacaggtctgtttttatgttcagtttgtacaatccacaattcattcaccagatattttgttcttaattgtgaaccaggttagcaaatgacctatcaaaaattattctataatcactactagttaggatattgatttaaaattgttctacttgaagtggtttctaagatttttatattaaaaataggtgtgatttcctaatatgatctaaaaccctaaatggttatttttcctcagaatgatttgtaaatagctactggaaatattatacagtaataggagtgggtattatgcaacatcatggagaagtgaaggcataggcttattctgacataaaattccactggccagttgaatatattctattccatgtccatactatgacaatcttattgtcaacactatataaataagcttttaaacaagtcatttttcttgatcgttgtggaaggtttggagccttagaggtatgtcagaaaaaatatgttggtattctcccttgggtagggggaaatgacctttttacaagagagtgaaatttaggtcagggaaaagaccaagggccagcattgctacttttgtgtgtgtgtgtgtgggttttgttttgtttttttggttggctggttgttttcgttgttgttaacaaaggaatgagaatatgtaatacttaaataaacatgaccacgaagaatgctgttctgatttactagagaatgttcccaatttgaatttagggtgattttaaagaacagtgagaaagggcatacatccacagattcactttgtttatgcatatgtagatacaaggatgcacatatacacattttcaaggactattttagatatctagacaatttcttctaataaagtcatttgtgaaagggtactacagcttattgacatcagtaaggtagcattcattacctgtttattctctgctgcatcttacagaagagtaaactggtgagagtatatattttatatatatatatatatatatatatataatatgtatatatatatatattgacttgttacatgaagatgttaaaatcggtttttaaaggtgatgtaaatagtgatttccttaatgaaaaatacatattttgtattgttctaatgcaacagaaaagccttttaatctctttggttcctgtatattccatgtataagtgtaaatataatcagacaggtttaaaagttgtgcatgtatgtatacagttgcaagtctggacaaatgtatagaataaaccttttatttaagttgtgattacctgctgcatgaaaagtgcatgggggaccctgtgcatctgtgcatttggcaaaatgtcttaacaaatcagatcagatgttcatcctaacatgacagtattccatttctggacatgacgtctgtggtttaagctttgtgaaagaatgtgctttgattcgaagggtcttaaagaatttttttaatcgtcaaccacttttaaacataaagaattcacacaactactttcatgaattttttaatcccattgcaaacattattccaagagtatcccagtattagcaatactggaatataggcacattaccattcatagtaagaattctggtgtttacacaaccaaatttgatgcgatctgctcagtaatataatttgccatttttattagaaatttaatttcttcatgtgatgtcatgaaactgtacatactgcagtgtgaatttttttgttttgttttttaatcttttagtgtttacttcctgcagtgaatttgaataaatgagaaaaaatgcattgtc

SEQ ID NO: 10244 - protein, 46 aa, Homo sapiens
MKALRSAEQIDYSGVPVLGTTAVRERTLIFAFNGEQKMKKEKEYIH

SEQ ID NO: 10245 - DNA, 7669 bp, Homo sapiens
ccgcccgccacccgcgcgcgcccgtccgcccgtggcctcgcgtccgccgctgcgccgtgagcgccgctggtcggagggaagagctcgccggggcgccgggccaggacggggcggcaggcgccttcgcggaccgagcctgacggagccggaggctgggagccgcggcggcctggggaagtgtttggattgtgagctatttcagaactgttctcaggactcattattttaacatttgggagaaacacagccagaagatgcacacttgactgaaggaggacagggaatctgaagactccggatgacatcagagctacttttcaacagccttctcaattttctttctcagaaagcagaggctcagagcttggagacagacgaacactgatatttgcatttaatggggaacaaaagatgaagaaggaaaaggaatatattcactaaggattctatctgcttactgctacagacctatgtgttaaggaattcttctcctcctccttgcgtagaagttgatcagcactgtggtcagactgcatttatcttgtcattgccagaagaaatcttggacagaatgtaacagtacgtctctctctgattgcgatggaaggtgataaactgatactcctttattaaagttacatcgcactcaccacagaaaaccattctttaaagtgaatagaaaccaagcccttgtgaacacttctattgaacatgactcatggagaagagcttggctctgatgtgcaccaggattctattgttttaacttacctagaaggattactaatgcatcaggcagcagggggatcaggtactgccgttgacaaaaagtctgctgggcataatgaagaggatcagaactttaacatttctggcagtgcatttcccacctgtcaaagtaatggtccagttctcaatacacatacatatcaggggtctggcatgctgcacctcaaaaaagccagactgttgcagtcttctgaggactggaatgcagcaaagcggaagaggctgtctgattctatcatgaatttaaacgtaaagaaggaagctttgctagctggcatggttgacagtgtgcctaaaggcaaacaggatagcacattactggcctctttgcttcagtcattcagctctaggctgcagactgttgctctgtcacaacaaatcaggcagagcctcaaggagcaaggatatgccctcagtcatgattctttaaaagtggagaaggatttaaggtgctatggtgttgcatcaagtcacttaaaaactttgttgaagaaaagtaaagttaaagatcaaaagcctgatacgaatcttcctgatgtgactaaaaacctcatcagagataggtttgcagagtctcctcatcatgttggacaaagtggaacaaaggtcatgagtgaaccgttgtcatgtgctgcaagattacaggctgttgcaagcatggtggaaaaaagggctagtcctgccacctcacctaaacctagtgttgcttgtagccagttagcattacttctgtcaagcgaagcccatttgcagcagtattctcgagaacacgctttaaaaacgcaaaatgcaaatcaagcagcaagtgaaagacttgctgctatggccagattgcaagaaaatggccagaaggatgttggcagttaccagctcccaaaaggaatgtcaagccatcttaatggtcaggcaagaacatcatcaagcaaactgatggctagcaaaagtagtgctacagtgtttcaaaatccaatgggtatcattccttcttcccctaaaaatgcaggttataagaactcactggaaagaaacaatataaaacaagctgctaacaatagtttgcttttacatcttcttaaaagccagactatacctaagccaatgaatggacacagtcacagtgagagaggaagcatttttgaggaaagtagtacacctacaactattgatgaatattcagataacaatcctagttttacagatgacagcagtggtgatgaaagttcttattccaactgtgttcccatagacttgtcttgcaaacaccgaactgaaaaatcagaatctgaccaacctgtttccctggataacttcactcaatccttgctaaacacttgggatccaaaagtcccagatgtagatatcaaagaagatcaagatacctcaaagaattctaagctaaactcacaccagaaagtaacacttcttcaattgctacttggccataagaatgaagaaaatgtagaaaaaaacaccagccctcagggagtacacaatgatgtgagcaagttcaatacacaaaattatgcaaggacttctgtgatagaaagccccagtacaaatcggactactccagtgagcactccacctttacttacatcaagcaaagcagggtctcccatcaatctctctcaacactctctggtcatcaaatggaattccccaccatatgtctgcagtactcagtctgaaaagctaacaaatactgcatctaaccactcaatggaccttacaaaaagcaaagacccaccaggagagaaaccagcccaaaatgaaggtgcacagaactctgcaacgtttagtgccagtaagctgttacaaaatttagcacaatgtggaatgcagtcatccatgtcagtggaagagcagagacccagcaaacagctgttaactggaaacacagataaaccgataggtatgattgatagattaaatagccctttgctctcaaataaaacaaatgcagttgaagaaaataaagcatttagtagtcaaccaacaggtcctgaaccagggctttctggttctgaaatagaaaatctgcttgaaagacgtactgtcctccagttgctcctggggaaccccaacaaagggaagagtgaaaaaaaagagaaaactcccttaagagatgaaagtactcaggaacactcagagagagctttaagtgaacaaatactgatggtgaaaataaaatctgagccttgtgatgacttacaaattcctaacacaaatgtgcacttgagccatgatgctaagagtgccccattcttgggtatggctcctgctgtgcagagaagcgcacctgccttaccagtgtccgaagactttaaatcggagcctgtttcacctcaggatttttctttctccaagaatggtctgctaagtcgattgctaagacaaaatcaagatagttacctggcagatgattcagacaggagtcacagaaataatgaaatggcacttctagaatcaaagaatctttgcatggtccctaagaaaaggaagctttatactgagccattagaaaatccatttaaaaagatgaaaaacaacattgttgatgctgcaaacaatcacagtgccccagaagtactgtatgggtccttgcttaaccaggaagagctgaaatttagcagaaatgatcttgaatttaaatatcctgctggtcatggctcagccagcgaaagtgaacacaggagttgggccagagagagcaaaagctttaatgttctgaaacagctgcttctctcagaaaactgtgtgcgagatttgtccccgcacagaagtaactctgtggctgacagtaaaaagaaaggacacaaaaataatgtgaccaacagcaaacctgaatttagcatttcttctttaaatggactgatgtacagttccactcagcccagcagttgcatggataacaggacattttcatacccaggtgtagtaaaaactcctgtgagtcctactttccctgagcacttgggctgtgcagggtctagaccagaatctgggcttttgaatgggtgttccatgcccagtgagaaaggacccattaagtgggttatcactgatgcggagaagaatgagtatgaaaaagactctccaagattgaccaaaaccaacccaatactatattacatgcttcaaaaaggaggcaattctgttaccagtcgagaaacacaagacaaggacatttggagggaggcttcatctgctgaaagtgtctcacaggtcacagccaaagaagagttacttcctactgcagaaacgaaagcttctttctttaatttaagaagcccttacaatagccatatgggaaataatgcttctcgcccacacagcgcaaatggagaagtttatggacttctgggaagcgtgctaacgataaagaaagaatcagaataaaatgtacctgccatccagttttggatctttttaaaactaatgagtatgaacttgagatctgtataaataagagcatgatttgaaaaaaagcatggtataattgaaacttttttcattttgaaaagtattggttactggtgatgttgaaatatgcatactaatttttgcttaacattagatgtcatgaggaaactactgaactagcaattggttgtttaacacttctgtatgcatcagataacaactgtgagtagcctatgaatgaaattcttttataaatattaggcataaattaaaatgtaaaactccattcatagtggattaatgcattttgctgcctttattagggtactttattttgcttttcagaagtcagcctacataacacatttttaaagtctaaactgttaaacaactctttaaaggataattatccaataaaaaaaaacctagtgctgattcacagcttattatccaattcaaaaataaattagaaaaatatatgcttacatttttcacttttgctaaaaagaaaaaaaaaaggtgtttatttttaactcttggaagaggttttgtggttcccaatgtgtctgtcccaccctgatccttttcaatatatatttctttaaaccttgtgctacttagtaaaaattgattacaattgagggaagtttgatagatcctttaaaaaaaaggcagatttccattttttgtattttaactactttactaaattaatactcctccttttacagaattagaaaagttaacatttatctttaggtggtttcctgaaaagttgaatatttaagaaattgtttttaacagaagcaaaatggcttttctttggacagttttcaccatctcttgtaaaagttaattctcaccattcctgtggtacctgcgagtgttatgaccaggattccttaaacctgaactcagaccacttgcattagaaccatctggagcacttgttttaaaatgcagattcataggcagcatctcagatctacagaacaagaatctctgctaagtggacctggaatcttccatctgcatcttaacatgctctctaggtgtttcttgtgtttgagaaccatgacttatgactttcctcagaacatgagactgtaaaacaaaaacaaaaaactatgtgatgcctctattttccccaatacagtcacacatcagctcaaaatttgcaatattgtagttcatatattaccgttatgtctttggaaatcgggttcagaacactttttatgacaaaaattgggtggaggggataactttcatatctggctcaacatctcaggaaaatctgtgattatttgtgtgttctaatgagtaacatctacttagttagccttagggatggaaaaacagggccacttaccaaactcaggtgattccaggatggtttggaaacttctcctgaatgcatccttaacctttattaaaaccattgtcctaagaacaatgccaacaaagcttacaacatttagtttaaacccaagaagggcactaaactcagattgactaaataaaaagtacaaagggcacatatacgtgacagaattgtacacaatcactccattggatcttttactttaaagtagtgatgaaaagtacatgttgatactgtcttagaagaaattaatatattagtgaagccacatggggtttcagttgcgaaacaggtctgtttttatgttcagtttgtacaatccacaattcattcaccagatattttgttcttaattgtgaaccaggttagcaaatgacctatcaaaaattattctataatcactactagttaggatattgatttaaaattgttctacttgaagtggtttctaagatttttatattaaaaataggtgtgatttcctaatatgatctaaaaccctaaatggttatttttcctcagaatgatttgtaaatagctactggaaatattatacagtaataggagtgggtattatgcaacatcatggagaagtgaaggcataggcttattctgacataaaattccactggccagttgaatatattctattccatgtccatactatgacaatcttattgtcaacactatataaataagcttttaaacaagtcatttttcttgatcgttgtggaaggtttggagccttagaggtatgtcagaaaaaatatgttggtattctcccttgggtagggggaaatgacctttttacaagagagtgaaatttaggtcagggaaaagaccaagggccagcattgctacttttgtgtgtgtgtgtgtgggttttgttttgtttttttggttggctggttgttttcgttgttgttaacaaaggaatgagaatatgtaatacttaaataaacatgaccacgaagaatgctgttctgatttactagagaatgttcccaatttgaatttagggtgattttaaagaacagtgagaaagggcatacatccacagattcactttgtttatgcatatgtagatacaaggatgcacatatacacattttcaaggactattttagatatctagacaatttcttctaataaagtcatttgtgaaagggtactacagcttattgacatcagtaaggtagcattcattacctgtttattctctgctgcatcttacagaagagtaaactggtgagagtatatattttatatatatatatatatatatatatataatatgtatatatatatatattgacttgttacatgaagatgttaaaatcggtttttaaaggtgatgtaaatagtgatttccttaatgaaaaatacatattttgtattgttctaatgcaacagaaaagccttttaatctctttggttcctgtatattccatgtataagtgtaaatataatcagacaggtttaaaagttgtgcatgtatgtatacagttgcaagtctggacaaatgtatagaataaaccttttatttaagttgtgattacctgctgcatgaaaagtgcatgggggaccctgtgcatctgtgcatttggcaaaatgtcttaacaaatcagatcagatgttcatcctaacatgacagtattccatttctggacatgacgtctgtggtttaagctttgtgaaagaatgtgctttgattcgaagggtcttaaagaatttttttaatcgtcaaccacttttaaacataaagaattcacacaactactttcatgaattttttaatcccattgcaaacattattccaagagtatcccagtattagcaatactggaatataggcacattaccattcatagtaagaattctggtgtttacacaaccaaatttgatgcgatctgctcagtaatataatttgccatttttattagaaatttaatttcttcatgtgatgtcatgaaactgtacatactgcagtgtgaatttttttgttttgttttttaatcttttagtgtttacttcctgcagtgaatttgaataaatgagaaaaaatgcattgtc

SEQ ID NO: 10246 - protein, 1158 aa, Homo sapiens; identical to SEQ ID NO: 1301

SEQ ID NO: 10247 - DNA, 7562 bp, Homo sapiens
cgacccggccccacgcccgcccgccacccgcgcgcgcccgtccgcccgtggcctcgcgtccgccgctgcgccgtgagcgccgctggtcggagggaagagctcgccggggcgccgggccaggacggggcggcaggcgccttcgcggaccgagcctgacggagccggaggctgggagccgcggcggcctggggaagtgtttggattgtgagctatttcagaactgttctcaggactcattattttaacatttgggagaaacacagccagaagaacactgatatttgcatttaatggggaacaaaagatgaagaaggaaaaggaatatattcactaaggattctatctgcttactgctacagacctatgtgttaaggaattcttctcctcctccttgcgtagaagttgatcagcactgtggtcagactgcatttatcttgtcattgccagaagaaatcttggacagaatgtaacagtacgtctctctctgattgcgatggaaggtgataaactgatactcctttattaaagttacatcgcactcaccacagaaaaccattctttaaagtgaatagaaaccaagcccttgtgaacacttctattgaacatgactcatggagaagagcttggctctgatgtgcaccaggattctattgttttaacttacctagaaggattactaatgcatcaggcagcagggggatcaggtactgccgttgacaaaaagtctgctgggcataatgaagaggatcagaactttaacatttctggcagtgcatttcccacctgtcaaagtaatggtccagttctcaatacacatacatatcaggggtctggcatgctgcacctcaaaaaagccagactgttgcagtcttctgaggactggaatgcagcaaagcggaagaggctgtctgattctatcatgaatttaaacgtaaagaaggaagctttgctagctggcatggttgacagtgtgcctaaaggcaaacaggatagcacattactggcctctttgcttcagtcattcagctctaggctgcagactgttgctctgtcacaacaaatcaggcagagcctcaaggagcaaggatatgccctcagtcatgattctttaaaagtggagaaggatttaaggtgctatggtgttgcatcaagtcacttaaaaactttgttgaagaaaagtaaagttaaagatcaaaagcctgatacgaatcttcctgatgtgactaaaaacctcatcagagataggtttgcagagtctcctcatcatgttggacaaagtggaacaaaggtcatgagtgaaccgttgtcatgtgctgcaagattacaggctgttgcaagcatggtggaaaaaagggctagtcctgccacctcacctaaacctagtgttgcttgtagccagttagcattacttctgtcaagcgaagcccatttgcagcagtattctcgagaacacgctttaaaaacgcaaaatgcaaatcaagcagcaagtgaaagacttgctgctatggccagattgcaagaaaatggccagaaggatgttggcagttaccagctcccaaaaggaatgtcaagccatcttaatggtcaggcaagaacatcatcaagcaaactgatggctagcaaaagtagtgctacagtgtttcaaaatccaatgggtatcattccttcttcccctaaaaatgcaggttataagaactcactggaaagaaacaatataaaacaagctgctaacaatagtttgcttttacatcttcttaaaagccagactatacctaagccaatgaatggacacagtcacagtgagagaggaagcatttttgaggaaagtagtacacctacaactattgatgaatattcagataacaatcctagttttacagatgacagcagtggtgatgaaagttcttattccaactgtgttcccatagacttgtcttgcaaacaccgaactgaaaaatcagaatctgaccaacctgtttccctggataacttcactcaatccttgctaaacacttgggatccaaaagtcccagatgtagatatcaaagaagatcaagatacctcaaagaattctaagctaaactcacaccagaaagtaacacttcttcaattgctacttggccataagaatgaagaaaatgtagaaaaaaacaccagccctcagggagtacacaatgatgtgagcaagttcaatacacaaaattatgcaaggacttctgtgatagaaagccccagtacaaatcggactactccagtgagcactccacctttacttacatcaagcaaagcagggtctcccatcaatctctctcaacactctctggtcatcaaatggaattccccaccatatgtctgcagtactcagtctgaaaagctaacaaatactgcatctaaccactcaatggaccttacaaaaagcaaagacccaccaggagagaaaccagcccaaaatgaaggtgcacagaactctgcaacgtttagtgccagtaagctgttacaaaatttagcacaatgtggaatgcagtcatccatgtcagtggaagagcagagacccagcaaacagctgttaactggaaacacagataaaccgataggtatgattgatagattaaatagccctttgctctcaaataaaacaaatgcagttgaagaaaataaagcatttagtagtcaaccaacaggtcctgaaccagggctttctggttctgaaatagaaaatctgcttgaaagacgtactgtcctccagttgctcctggggaaccccaacaaagggaagagtgaaaaaaaagagaaaactcccttaagagatgaaagtactcaggaacactcagagagagctttaagtgaacaaatactgatggtgaaaataaaatctgagccttgtgatgacttacaaattcctaacacaaatgtgcacttgagccatgatgctaagagtgccccattcttgggtatggctcctgctgtgcagagaagcgcacctgccttaccagtgtccgaagactttaaatcggagcctgtttcacctcaggatttttctttctccaagaatggtctgctaagtcgattgctaagacaaaatcaagatagttacctggcagatgattcagacaggagtcacagaaataatgaaatggcacttctagaatcaaagaatctttgcatggtccctaagaaaaggaagctttatactgagccattagaaaatccatttaaaaagatgaaaaacaacattgttgatgctgcaaacaatcacagtgccccagaagtactgtatgggtccttgcttaaccaggaagagctgaaatttagcagaaatgatcttgaatttaaatatcctgctggtcatggctcagccagcgaaagtgaacacaggagttgggccagagagagcaaaagctttaatgttctgaaacagctgcttctctcagaaaactgtgtgcgagatttgtccccgcacagaagtaactctgtggctgacagtaaaaagaaaggacacaaaaataatgtgaccaacagcaaacctgaatttagcatttcttctttaaatggactgatgtacagttccactcagcccagcagttgcatggataacaggacattttcatacccaggtgtagtaaaaactcctgtgagtcctactttccctgagcacttgggctgtgcagggtctagaccagaatctgggcttttgaatgggtgttccatgcccagtgagaaaggacccattaagtgggttatcactgatgcggagaagaatgagtatgaaaaagactctccaagattgaccaaaaccaacccaatactatattacatgcttcaaaaaggaggcaattctgttaccagtcgagaaacacaagacaaggacatttggagggaggcttcatctgctgaaagtgtctcacaggtcacagccaaagaagagttacttcctactgcagaaacgaaagcttctttctttaatttaagaagcccttacaatagccatatgggaaataatgcttctcgcccacacagcgcaaatggagaagtttatggacttctgggaagcgtgctaacgataaagaaagaatcagaataaaatgtacctgccatccagttttggatctttttaaaactaatgagtatgaacttgagatctgtataaataagagcatgatttgaaaaaaagcatggtataattgaaacttttttcattttgaaaagtattggttactggtgatgttgaaatatgcatactaatttttgcttaacattagatgtcatgaggaaactactgaactagcaattggttgtttaacacttctgtatgcatcagataacaactgtgagtagcctatgaatgaaattcttttataaatattaggcataaattaaaatgtaaaactccattcatagtggattaatgcattttgctgcctttattagggtactttattttgcttttcagaagtcagcctacataacacatttttaaagtctaaactgttaaacaactctttaaaggataattatccaataaaaaaaaacctagtgctgattcacagcttattatccaattcaaaaataaattagaaaaatatatgcttacatttttcacttttgctaaaaagaaaaaaaaaaggtgtttatttttaactcttggaagaggttttgtggttcccaatgtgtctgtcccaccctgatccttttcaatatatatttctttaaaccttgtgctacttagtaaaaattgattacaattgagggaagtttgatagatcctttaaaaaaaaggcagatttccattttttgtattttaactactttactaaattaatactcctccttttacagaattagaaaagttaacatttatctttaggtggtttcctgaaaagttgaatatttaagaaattgtttttaacagaagcaaaatggcttttctttggacagttttcaccatctcttgtaaaagttaattctcaccattcctgtggtacctgcgagtgttatgaccaggattccttaaacctgaactcagaccacttgcattagaaccatctggagcacttgttttaaaatgcagattcataggcagcatctcagatctacagaacaagaatctctgctaagtggacctggaatcttccatctgcatcttaacatgctctctaggtgtttcttgtgtttgagaaccatgacttatgactttcctcagaacatgagactgtaaaacaaaaacaaaaaactatgtgatgcctctattttccccaatacagtcacacatcagctcaaaatttgcaatattgtagttcatatattaccgttatgtctttggaaatcgggttcagaacactttttatgacaaaaattgggtggaggggataactttcatatctggctcaacatctcaggaaaatctgtgattatttgtgtgttctaatgagtaacatctacttagttagccttagggatggaaaaacagggccacttaccaaactcaggtgattccaggatggtttggaaacttctcctgaatgcatccttaacctttattaaaaccattgtcctaagaacaatgccaacaaagcttacaacatttagtttaaacccaagaagggcactaaactcagattgactaaataaaaagtacaaagggcacatatacgtgacagaattgtacacaatcactccattggatcttttactttaaagtagtgatgaaaagtacatgttgatactgtcttagaagaaattaatatattagtgaagccacatggggtttcagttgcgaaacaggtctgtttttatgttcagtttgtacaatccacaattcattcaccagatattttgttcttaattgtgaaccaggttagcaaatgacctatcaaaaattattctataatcactactagttaggatattgatttaaaattgttctacttgaagtggtttctaagatttttatattaaaaataggtgtgatttcctaatatgatctaaaaccctaaatggttatttttcctcagaatgatttgtaaatagctactggaaatattatacagtaataggagtgggtattatgcaacatcatggagaagtgaaggcataggcttattctgacataaaattccactggccagttgaatatattctattccatgtccatactatgacaatcttattgtcaacactatataaataagcttttaaacaagtcatttttcttgatcgttgtggaaggtttggagccttagaggtatgtcagaaaaaatatgttggtattctcccttgggtagggggaaatgacctttttacaagagagtgaaatttaggtcagggaaaagaccaagggccagcattgctacttttgtgtgtgtgtgtgtgggttttgttttgtttttttggttggctggttgttttcgttgttgttaacaaaggaatgagaatatgtaatacttaaataaacatgaccacgaagaatgctgttctgatttactagagaatgttcccaatttgaatttagggtgattttaaagaacagtgagaaagggcatacatccacagattcactttgtttatgcatatgtagatacaaggatgcacatatacacattttcaaggactattttagatatctagacaatttcttctaataaagtcatttgtgaaagggtactacagcttattgacatcagtaaggtagcattcattacctgtttattctctgctgcatcttacagaagagtaaactggtgagagtatatattttatatatatatatatatatatatatataatatgtatatatatatatattgacttgttacatgaagatgttaaaatcggtttttaaaggtgatgtaaatagtgatttccttaatgaaaaatacatattttgtattgttctaatgcaacagaaaagccttttaatctctttggttcctgtatattccatgtataagtgtaaatataatcagacaggtttaaaagttgtgcatgtatgtatacagttgcaagtctggacaaatgtatagaataaaccttttatttaagttgtgattacctgctgcatgaaaagtgcatgggggaccctgtgcatctgtgcatttggcaaaatgtcttaacaaatcagatcagatgttcatcctaacatgacagtattccatttctggacatgacgtctgtggtttaagctttgtgaaagaatgtgctttgattcgaagggtcttaaagaatttttttaatcgtcaaccacttttaaacataaagaattcacacaactactttcatgaattttttaatcccattgcaaacattattccaagagtatcccagtattagcaatactggaatataggcacattaccattcatagtaagaattctggtgtttacacaaccaaatttgatgcgatctgctcagtaatataatttgccatttttattagaaatttaatttcttcatgtgatgtcatgaaactgtacatactgcagtgtgaatttttttgttttgttttttaatcttttagtgtttacttcctgcagtgaatttgaataaatgagaaaaaatgcattgtc

SEQ ID NO: 10248 - protein, 1158 aa, Homo sapiens; identical to SEQ ID NO: 1301

SEQ ID NO: 10249 - DNA, 7463 bp, Homo sapiens
gctggagacttcgcagtgacaaagcagccgaggattaaccctgctcctgggtcctacgtctgtccagggagctgagcggggcgctcctcaggaagtgtttggattgtgagctatttcagaactgttctcaggactcattattttaacatttgggagaaacacagccagaagaacactgatatttgcatttaatggggaacaaaagatgaagaaggaaaaggaatatattcactaaggattctatctgcttactgctacagacctatgtgttaaggaattcttctcctcctccttgcgtagaagttgatcagcactgtggtcagactgcatttatcttgtcattgccagaagaaatcttggacagaatgtaacagtacgtctctctctgattgcgatggaaggtgataaactgatactcctttattaaagttacatcgcactcaccacagaaaaccattctttaaagtgaatagaaaccaagcccttgtgaacacttctattgaacatgactcatggagaagagcttggctctgatgtgcaccaggattctattgttttaacttacctagaaggattactaatgcatcaggcagcagggggatcaggtactgccgttgacaaaaagtctgctgggcataatgaagaggatcagaactttaacatttctggcagtgcatttcccacctgtcaaagtaatggtccagttctcaatacacatacatatcaggggtctggcatgctgcacctcaaaaaagccagactgttgcagtcttctgaggactggaatgcagcaaagcggaagaggctgtctgattctatcatgaatttaaacgtaaagaaggaagctttgctagctggcatggttgacagtgtgcctaaaggcaaacaggatagcacattactggcctctttgcttcagtcattcagctctaggctgcagactgttgctctgtcacaacaaatcaggcagagcctcaaggagcaaggatatgccctcagtcatgattctttaaaagtggagaaggatttaaggtgctatggtgttgcatcaagtcacttaaaaactttgttgaagaaaagtaaagttaaagatcaaaagcctgatacgaatcttcctgatgtgactaaaaacctcatcagagataggtttgcagagtctcctcatcatgttggacaaagtggaacaaaggtcatgagtgaaccgttgtcatgtgctgcaagattacaggctgttgcaagcatggtggaaaaaagggctagtcctgccacctcacctaaacctagtgttgcttgtagccagttagcattacttctgtcaagcgaagcccatttgcagcagtattctcgagaacacgctttaaaaacgcaaaatgcaaatcaagcagcaagtgaaagacttgctgctatggccagattgcaagaaaatggccagaaggatgttggcagttaccagctcccaaaaggaatgtcaagccatcttaatggtcaggcaagaacatcatcaagcaaactgatggctagcaaaagtagtgctacagtgtttcaaaatccaatgggtatcattccttcttcccctaaaaatgcaggttataagaactcactggaaagaaacaatataaaacaagctgctaacaatagtttgcttttacatcttcttaaaagccagactatacctaagccaatgaatggacacagtcacagtgagagaggaagcatttttgaggaaagtagtacacctacaactattgatgaatattcagataacaatcctagttttacagatgacagcagtggtgatgaaagttcttattccaactgtgttcccatagacttgtcttgcaaacaccgaactgaaaaatcagaatctgaccaacctgtttccctggataacttcactcaatccttgctaaacacttgggatccaaaagtcccagatgtagatatcaaagaagatcaagatacctcaaagaattctaagctaaactcacaccagaaagtaacacttcttcaattgctacttggccataagaatgaagaaaatgtagaaaaaaacaccagccctcagggagtacacaatgatgtgagcaagttcaatacacaaaattatgcaaggacttctgtgatagaaagccccagtacaaatcggactactccagtgagcactccacctttacttacatcaagcaaagcagggtctcccatcaatctctctcaacactctctggtcatcaaatggaattccccaccatatgtctgcagtactcagtctgaaaagctaacaaatactgcatctaaccactcaatggaccttacaaaaagcaaagacccaccaggagagaaaccagcccaaaatgaaggtgcacagaactctgcaacgtttagtgccagtaagctgttacaaaatttagcacaatgtggaatgcagtcatccatgtcagtggaagagcagagacccagcaaacagctgttaactggaaacacagataaaccgataggtatgattgatagattaaatagccctttgctctcaaataaaacaaatgcagttgaagaaaataaagcatttagtagtcaaccaacaggtcctgaaccagggctttctggttctgaaatagaaaatctgcttgaaagacgtactgtcctccagttgctcctggggaaccccaacaaagggaagagtgaaaaaaaagagaaaactcccttaagagatgaaagtactcaggaacactcagagagagctttaagtgaacaaatactgatggtgaaaataaaatctgagccttgtgatgacttacaaattcctaacacaaatgtgcacttgagccatgatgctaagagtgccccattcttgggtatggctcctgctgtgcagagaagcgcacctgccttaccagtgtccgaagactttaaatcggagcctgtttcacctcaggatttttctttctccaagaatggtctgctaagtcgattgctaagacaaaatcaagatagttacctggcagatgattcagacaggagtcacagaaataatgaaatggcacttctagaatcaaagaatctttgcatggtccctaagaaaaggaagctttatactgagccattagaaaatccatttaaaaagatgaaaaacaacattgttgatgctgcaaacaatcacagtgccccagaagtactgtatgggtccttgcttaaccaggaagagctgaaatttagcagaaatgatcttgaatttaaatatcctgctggtcatggctcagccagcgaaagtgaacacaggagttgggccagagagagcaaaagctttaatgttctgaaacagctgcttctctcagaaaactgtgtgcgagatttgtccccgcacagaagtaactctgtggctgacagtaaaaagaaaggacacaaaaataatgtgaccaacagcaaacctgaatttagcatttcttctttaaatggactgatgtacagttccactcagcccagcagttgcatggataacaggacattttcatacccaggtgtagtaaaaactcctgtgagtcctactttccctgagcacttgggctgtgcagggtctagaccagaatctgggcttttgaatgggtgttccatgcccagtgagaaaggacccattaagtgggttatcactgatgcggagaagaatgagtatgaaaaagactctccaagattgaccaaaaccaacccaatactatattacatgcttcaaaaaggaggcaattctgttaccagtcgagaaacacaagacaaggacatttggagggaggcttcatctgctgaaagtgtctcacaggtcacagccaaagaagagttacttcctactgcagaaacgaaagcttctttctttaatttaagaagcccttacaatagccatatgggaaataatgcttctcgcccacacagcgcaaatggagaagtttatggacttctgggaagcgtgctaacgataaagaaagaatcagaataaaatgtacctgccatccagttttggatctttttaaaactaatgagtatgaacttgagatctgtataaataagagcatgatttgaaaaaaagcatggtataattgaaacttttttcattttgaaaagtattggttactggtgatgttgaaatatgcatactaatttttgcttaacattagatgtcatgaggaaactactgaactagcaattggttgtttaacacttctgtatgcatcagataacaactgtgagtagcctatgaatgaaattcttttataaatattaggcataaattaaaatgtaaaactccattcatagtggattaatgcattttgctgcctttattagggtactttattttgcttttcagaagtcagcctacataacacatttttaaagtctaaactgttaaacaactctttaaaggataattatccaataaaaaaaaacctagtgctgattcacagcttattatccaattcaaaaataaattagaaaaatatatgcttacatttttcacttttgctaaaaagaaaaaaaaaaggtgtttatttttaactcttggaagaggttttgtggttcccaatgtgtctgtcccaccctgatccttttcaatatatatttctttaaaccttgtgctacttagtaaaaattgattacaattgagggaagtttgatagatcctttaaaaaaaaggcagatttccattttttgtattttaactactttactaaattaatactcctccttttacagaattagaaaagttaacatttatctttaggtggtttcctgaaaagttgaatatttaagaaattgtttttaacagaagcaaaatggcttttctttggacagttttcaccatctcttgtaaaagttaattctcaccattcctgtggtacctgcgagtgttatgaccaggattccttaaacctgaactcagaccacttgcattagaaccatctggagcacttgttttaaaatgcagattcataggcagcatctcagatctacagaacaagaatctctgctaagtggacctggaatcttccatctgcatcttaacatgctctctaggtgtttcttgtgtttgagaaccatgacttatgactttcctcagaacatgagactgtaaaacaaaaacaaaaaactatgtgatgcctctattttccccaatacagtcacacatcagctcaaaatttgcaatattgtagttcatatattaccgttatgtctttggaaatcgggttcagaacactttttatgacaaaaattgggtggaggggataactttcatatctggctcaacatctcaggaaaatctgtgattatttgtgtgttctaatgagtaacatctacttagttagccttagggatggaaaaacagggccacttaccaaactcaggtgattccaggatggtttggaaacttctcctgaatgcatccttaacctttattaaaaccattgtcctaagaacaatgccaacaaagcttacaacatttagtttaaacccaagaagggcactaaactcagattgactaaataaaaagtacaaagggcacatatacgtgacagaattgtacacaatcactccattggatcttttactttaaagtagtgatgaaaagtacatgttgatactgtcttagaagaaattaatatattagtgaagccacatggggtttcagttgcgaaacaggtctgtttttatgttcagtttgtacaatccacaattcattcaccagatattttgttcttaattgtgaaccaggttagcaaatgacctatcaaaaattattctataatcactactagttaggatattgatttaaaattgttctacttgaagtggtttctaagatttttatattaaaaataggtgtgatttcctaatatgatctaaaaccctaaatggttatttttcctcagaatgatttgtaaatagctactggaaatattatacagtaataggagtgggtattatgcaacatcatggagaagtgaaggcataggcttattctgacataaaattccactggccagttgaatatattctattccatgtccatactatgacaatcttattgtcaacactatataaataagcttttaaacaagtcatttttcttgatcgttgtggaaggtttggagccttagaggtatgtcagaaaaaatatgttggtattctcccttgggtagggggaaatgacctttttacaagagagtgaaatttaggtcagggaaaagaccaagggccagcattgctacttttgtgtgtgtgtgtgtgggttttgttttgtttttttggttggctggttgttttcgttgttgttaacaaaggaatgagaatatgtaatacttaaataaacatgaccacgaagaatgctgttctgatttactagagaatgttcccaatttgaatttagggtgattttaaagaacagtgagaaagggcatacatccacagattcactttgtttatgcatatgtagatacaaggatgcacatatacacattttcaaggactattttagatatctagacaatttcttctaataaagtcatttgtgaaagggtactacagcttattgacatcagtaaggtagcattcattacctgtttattctctgctgcatcttacagaagagtaaactggtgagagtatatattttatatatatatatatatatatatatataatatgtatatatatatatattgacttgttacatgaagatgttaaaatcggtttttaaaggtgatgtaaatagtgatttccttaatgaaaaatacatattttgtattgttctaatgcaacagaaaagccttttaatctctttggttcctgtatattccatgtataagtgtaaatataatcagacaggtttaaaagttgtgcatgtatgtatacagttgcaagtctggacaaatgtatagaataaaccttttatttaagttgtgattacctgctgcatgaaaagtgcatgggggaccctgtgcatctgtgcatttggcaaaatgtcttaacaaatcagatcagatgttcatcctaacatgacagtattccatttctggacatgacgtctgtggtttaagctttgtgaaagaatgtgctttgattcgaagggtcttaaagaatttttttaatcgtcaaccacttttaaacataaagaattcacacaactactttcatgaattttttaatcccattgcaaacattattccaagagtatcccagtattagcaatactggaatataggcacattaccattcatagtaagaattctggtgtttacacaaccaaatttgatgcgatctgctcagtaatataatttgccatttttattagaaatttaatttcttcatgtgatgtcatgaaactgtacatactgcagtgtgaatttttttgttttgttttttaatcttttagtgtttacttcctgcagtgaatttgaataaatgagaaaaaatgcattgtc

SEQ ID NO: 10250 - protein, 1158 aa, Homo sapiens; identical to SEQ ID NO: 1301

SEQ ID NO: 10251 - DNA, 751 bp, Homo sapiens
actgaactcccaatctgcttcaagatctgtcttaggattggtgaattatgttcatttttaaaaagggatgtgatagacaacatctagagaaacaggcaaggagtatatatctgaaaaggacaaggcgctttgaaactgacagctcatcaacaggttcatggatgaacctggaaatatttataaatattgattccagatttcagagacggggtttcgaaatgttgcccaggttggtctagaactcccggactcaagtgatcccccgaccaggcctcccaaagtgctgggattatcggtgtgagccaccaacccctgcagagtctacatctgaaataaaccacagaagcaaggatatcacttaaacaatgtaacttaccaattcagtctgagtgagttttgtagtttataacatattgatgaaaacagttaagtgtccacattccgtttacataagagaatgctattcaagcttttaaaataaaaaacttaaactattcccctcaccccccaaaaagtctaactataaagatgggtttgctacaaaataattagcaaaactgatttaccaagtaagatgtcctcccgctcactgccccccagaaatacgtatactgtaggaatactcctaggaagtgacacaagtgaaagaaagaatattctttcaatatgctaaaaacatctacagtgcactaaaaaaaagtccctaaatttggcaatacatttcttccaaaaatgttattcaataacataa

SEQ ID NO: 10252 - protein, 63 aa, Homo sapiens
MFIFKKGCDRQHLEKQARSIYLKRTRRFETDSSSTGSWMNLEIFINIDSRFQRRGFEMLPRLV

SEQ ID NO: 10253 - DNA, 498 bp, Homo sapiens
gctgaagaagtagcagccctgctccttttcccttgtcttgttgggtcagatccttcccggggatgatgcagattggctgacagactccgctggagacttcgcagtgacaaagcagccgaggattaaccctgctcctgggtcctacgtctgtccagggagctgagcggggcgctcctcaggaagtgtttggattgtgagctatttcagaactgttctcaggactcattattttaacatttgggagaaacacagccagaagctgaaaaaactgagcctcggaacagttaagtaaatccaccaaagtgacccactactgaatagcagagtcaggaatccagagactgttcttttcaccacaatgctttgtggccttcctaataaaagcaagagactgacactggcagagacaagattttagagtgggaaaagtaatccagaattctcagagtgctgcataaattttgctttacgaaaagttttcaaatccacatttgttac

SEQ ID NO: 10254 - protein, 42 aa, Homo sapiens
AGRSSGSVWIVSYFRTVLRTHYFNIWEKHSQKLKKLSLGTVK

SEQ ID NO: 10255 - DNA, 573 bp, Homo sapiens
atttcttattcggagaccgaaccgaggagagctgctgaagaagtagcagccctgctccttttcccttgtcttgttgggtcagatccttcccggggatgatgcagattggctgacagactccgctggagacttcgcagtgacaaagcagccgaggattaaccctgctcctgggtcctacgtctgtccagggagctgagcggggcgctcctcaggaagtgtttggattgtgagctatttcagaactgttctcaggactcattattttaacatttgggagaaacacagccagaagatgcacacttgactgaaggaggacagggaatctgaagactccggatgacatcagagctacttttcaacagccttctcaattttctttctcagaaagcagaggctcagagcttggagacagacgccccagagttccaaaagttggtttgcatggacagattcagagcagtcccacagagcccaggtcctgttaataagaagaggcatgttacatgatacgcacaaagaaactgaaaaaactgagcctcggaacagttaagtaaatccaccaaagtgacccac

SEQ ID NO: 10256 - protein, 56 aa, Homo sapiens
MTSELLFNSLLNFLSQKAEAQSLETDAPEFQKLVCMDRFRAVPQSPGPVNKKRHVT

SEQ ID NO: 10257 - DNA, 446 bp, Homo sapiens
agtaattattgtagtaggttgtagcggattcagtaaatatatccagttcctattctatattctttctaggtgttaggaatgctcccaggaggtacaaaagctatcagtcgctgcaccgaaggactctaggatgctatgacttagttttggaccatggagattgcccagcaagccgagaatattccagccctccaacattgttgttaaaaagtccactgctgtatgttaggtgacttcccaaagctgctcactacttcttcttattctgttttctcaaccccacaaaaatccaatcactgaaatcctgaactcttttgatagtggcatgagtgttaagtaaattgcacacctcttgtggaattcattttcacttaatcatgctaattatgtggagacttgtttgttgttgttctttgtttttttaagtaaatcaatacctaaatttc

SEQ ID NO: 10258 - protein, 71 aa, Homo sapiens
VVADSVNISSSYSIFFLGVRNAPRRYKSYQSLHRRTLGCYDLVLDHGDCPASREYSSPPTLLLKSPLLYVR

SEQ ID NO: 10259 - DNA, 762 bp, Homo sapiens
aactaggacaactaatatgcttcaaacttccaatgataatgtatagacaagaagacagctctgtcctctaggctgtgcttttagtgccaactttcttaataacatcacctattctgctgacactcactctggaggaataaaactttagagcccctggctaaacaggatctgagaggaaggttggaatccagtggcagtatcgtggctcactgcaacctcaacctgccactctcatgccatccaaccacctcagcctccctagtagctgggactacaggtatacgccacaatgcccaggtttttactcctgggtctgaaaaagtcatcaaatcttggtaattcttagacactgacatcagtcaaagcctcatctgcagacctaggagaaggtgataataaaaatgaactgcttttgtgagacacggggccagaaattaaaactgttcaattgctctaggcccaagcattatttcagaagaggctggcatgaagtggctcaatctcagctcactgcaacctccacctcaaggattgaagcgattctcatgcctcagactccccagtagctggggttacaggtcaaaaactactaccgcaatgagtgggaagtcagatgattaatgtctgctgtttacacagaaacttgcagagatttacagcaagagcataagtatatcaagatgacaataacaacaatgtttaacatctagaagccacttccaacaaaaccatgtggaaggcgggagcaaattgcatagatgt

SEQ ID NO: 10260 - protein, 54 aa, Homo sapiens
MNCFCETRGQKLKLFNCSRPKHYFRRGWHEVAQSQLTATSTSRIEAILMPQTPQ

SEQ ID NO: 10261 - DNA, 2884 bp, Homo sapiens
aggcggttgctacccacctgctagaggcgctgcggctgtgatccaggctggggcgagaccatgtcggacctgggctcggaggagttggaggaggagggagagaatgatattggggaatatgaggggggtcggaatgaggcaggcgaaaggcacggacgtgggagggcacggctacccaacggggacacctacgaagggagctacgaattcggtaaaagacatggccaggggatctacaaatttaaaaatggtgctcgatatatcggagaatatgttagaaataaaaagcacggtcaaggcacttttatatatccagatggatccagatatgaaggagagtgggcaaatgacctgcggcacggccatggcgtatactactacatcaataatgacacctacactggagagtggtttgctcatcaaaggttcggtttctatcttgggtcttaacgggatttgcttatgtaatgagaacatgatgtctgcagattgtttacacttactgaggaacagaatcataacaaaagcccagttaccaactctgccaggcaggtccaatctttctatggctttgaggcaaggatgcctttctgtgcaagtgtagactcaagtatctgacatctgcacctcagttggggcagagcacgtgagtctttcacccaagagtcccagggagtggagggcacagaagagccactgggggacctgagccacagctcccactagctctgcctcttccctggggaaagcagctgacacacaggaggcttgcctctgtccagctggcctgtcctctgtgcctctggcaatgtcctgtgcttggggcacactgagcaaggggcaccttctgactggacacagatatagaagctacatcgcttgtgagcctgcaacagcctgggcctccctcaatgtcaatgtctgtgttttaaacctgggagatttttcactgtgctggaacgaaataccatgttccccttgtcttaaccaggcatgggcaaggcacctatttatacgcggagacgggcagtaagtatgttggcacctgggtgaacggacagcaggagggcacggccgagctcattcacctgaaccacaggtaccagggcaagttcttgaacaaaaatgtaagtccatgggaagtgacatttgccaatgaagtacaaaataaccccctctggcagcctgtgcaaatgtgtgaccagagaataccaaaaactcagagaaaactgagtccggcctattcaaatgtggagaacaggacagctgtgccattctctgagcctctggtacccacagagcacagaattgggggaagggagggattggcccgtttctctggatctcagtacaaattcccactgtctttcagcggggacctgttgcattgttatataacacgagagggcatctgaacctcttgtgtgtattccttctcatgggtaaatcagataccaaatatctatttcctgcaattgagcatagaggtgtttgggttttgtttccctggaaggggaggtgcgacatccctggggaggaagacccccagctccctcctcatgctacaggccagcctgcgtgctcctagttgtggtgggaattaaggctgccaagggcctggccctgcgtctggaggcttgccagcttctagcacccatggtgggccgtttctgtttggaagactcggtggttcctcttgcccttattgtacagagaaaccttgaataattcagaagctaatactcaggccatcgtggtagctttgatcaggggttgagcagaaactttccctgaagagagaatttgcggagcaaattgatggtgttagaagttgacagagggaatgtttagctgatacaacgaagtctcttcagactctcttagaacccagttttcatttacgtataattcatgccctaaccacagattttacttttagttttcatcaaaacagcacattcccctcaaacccatacattgtttatataattcccagcaaactttctgtgggtctttttggaggagatgggaaggtggttgcagaggaagagaatttgatgaaaatgaatctggaagaatcaatcagcttgtccagcctaaaccagtctgaaaaatcgggcctgttggccctggaaagtatgtatttgatgttgggtgtgaacaacatggtgaatatcgtttaacagatatggaaagaggagaagaggaagaggaggaagaattagtaactgttgttccaaaatggaaagctacccaaatcactgaattggccctgtggacaccaactctccccaaaaagccgacctctacggatggacctggccaagacgctccaggagctgagagtgcaggagaacccggggaggaggcccaggctctgctggagggcttcgagggtgagatggacatgaggcctggagatgaagatgcagacgtcctccgggaagagagccgggagtatgaccaggaggagttccgctatgacatggatgagggaaacattaattctgaagaagaagaaactagacagtcagacctccaggactaagatgaagtgagccgagaggagatcgtatcataagaatgcttctgtcgttagccgggtgcagtgctgtgtgtatctagttccagctacttgagaggctgaggcaggaggattgcttgagtccagaaagtggcagttgcagtgagtggagatcgcgccactgctctccagcctgggtggcagagcgagaccctgtctcaaaaaataaacaaaaacaaaatgcttctgtcagttaacaatctttattagagggtttttagtctttctttctcagctgtatgttaagttgattgacaaatgcaaataaacgtctttattatcctttctttctgaaatagc

SEQ ID NO: 10262 - protein, 166 aa, Homo sapiens
MILGNMRGVGMRQAKGTDVGGHGYPTGTPTKGATNSVKDMARGSTNLKMVLDISENMLEIKSTVKALLYIQMDPDMKESGQMTCGTAMAYTTTSIMTPTLESGLLIKGSVSILGLNGICLCNENMMSADCLHLLRNRIITKAQLPTLPGRSNLSMALRQGCLSVQV

SEQ ID NO: 10263 - DNA, 1434 bp, Homo sapiens
tggctcctcccgcttcgtccgcgtcgcctgtccccgctccccatcttccgggctgggagggaggcgggaccggccgcgtctccatggcgacgcgggacgcggcggtggaggcggttgctacccacctgctagaggcgctgcggctgtgatccaggctggggcgagaccatgtcggacctgggctcggaggagttggaggaggagggagagaatgatattggggaatatgaggggggtcggaatgaggcaggcgaaaggcacggacgtgggagggcacggctacccaacggggacacctacgaagggagctacgaattcggtaaaagacatggccaggggatctacaaatttaaaaatggtgctcgatatatcggagaatatgttagaaataaaaagcacggtcaaggcacttttatatatccagatggatccagatatgaaggagagtgggcaaatgacctgcggcacggccatggcgtatactactacatcaataatgacacctacactggagagtggtttgctcatcaaaggcatgggcaaggcacctatttatacgcggagacgggcagtaagtatgttggcacctgggtgaacggacagcaggagggcacggccgagctcattcacctgaaccacaggtaccagggcaagttcttgaacaaaaatcctgttggccctggaaagtatgtatttgatgttgggtgtgaacaacatggtgaatatcgtttaacagatatggaaagaggagaagaggaagaggaggaagaattagtaactgttgttccaaaatggaaagctacccaaatcactgaattggccctgtggacaccaactctccccaaaaagccgacctctacggatggacctggccaagacgctccaggagctgagagtgcaggagaacccggggaggaggcccaggctctgctggagggcttcgagggtgagatggacatgaggcctggagatgaagatgcagacgtcctccgggaagagagccgggagtatgaccaggaggagttccgctatgacatggatgagggaaacattaattctgaagaagaagaaactagacagtcagacctccaggactaagatgaagtgagccgagaggagatcgtatcataagaatgcttctgtcgttagccgggtgcagtgctgtgtgtatctagttccagctacttgagaggctgaggcaggaggattgcttgagtccagaaagtggcagttgcagtgagtggagatcgcgccactgctctccagcctgggtggcagagcgagaccctgtctcaaaaaataaacaaaaacaaaatgcttctgtcagttaacaatctttattagagggtttttagtctttctttctcagctgtatgttaagttgattgacaaatgcaaataaacgtctttattatcctttctttctgaaatagc

SEQ ID NO: 10264 - protein, 309 aa, Homo sapiens; identical to SEQ ID NO: 1303

SEQ ID NO: 10265 - DNA, 568 bp, Homo sapiens
ggggagctgtggctcagacctctggtttctgcgcctcctcactctccaaacccaacctcgaggttcccccgccgctgcgcaccctgggaagccctttctcaccaggagctctcaccccaatatcattctctccctcctcctccaactcctccgagcccaggtccgacatggtctcgccccagcctggatcacagccgcagcgcctctagcagctttatagaattgagagattgctgagcctaaatacatgttgctgcattgcctccgagaatggccggacctatccccactctcaccaaaacagagtgtgggactcactgctccctcgcctactagagcagagccactgccagaaggaaggggacaagacccagcaggacaccttctttccacgctttccagcctgtgggagcggcaggggcaacagagagaggatctggagccaggattaatgactcatttatgaagcatcttattctgcgaccgaggctcagtggtcagtggcgacgtaaatggctcgactccccgctggcattcgcttcatcatctcattctccagggatcagtg

SEQ ID NO: 10266 - protein, 72 aa, Homo sapiens
MLLHCLREWPDLSPLSPKQSVGLTAPSPTRAEPLPEGRGQDPAGHLLSTLSSLWERQGQQREDLEPGLMTHL

SEQ ID NO: 10267 - DNA, 604 bp, Homo sapiens
atggagacgcggccggtcccgcctccctcccagcccggaagatggggagcggggacaggcgacgcggacgaagcgggaggagccactggcagcctttgccaacgaggggccgcttcggccaatcactgctcgggaagcgagggggcggggactgggcagggcctgagcgggttctgtgcctggctgcccaccggctctctgacctggacctcgccgtcgctggcccctgaaatccatcacttttgtcggctgttctgtgacgccacaacgaggagccacctgggctctgctgacccttcgggattcgcggctagctgtgatgtgtccgccaagatctcttctcttgtctgtaaacaacttcactctcaaggaggcagctctggcctctcagcaggagctggggaggagtgactgaataactataggatttggtcttgatgggagaatcccagaagccaaatccacgcggtgaataagctgctgatcttccagagcacacatcccctagagattcttcccaatgctaatatgaaaggttacaaccataacccatcatcaggcccaaatatattacttactgaataaatacacaagttacaacaac

SEQ ID NO: 10268 - protein, 136 aa, Homo sapiens; identical to SEQ ID NO: 1305

SEQ ID NO: 10269 - DNA, 3097 bp, Homo sapiens
aagtgggaagttcgcgcaagtgcggctctgcagggaggagggagggccgaggggaaggccctcgagagagtggagggcaacagtggccacggttcctctgtacttcgtttcttccctttatagaattgagagattgctgagcctaaatacatgttgctgcattgcctccgagaatggccggacctatccccactctcaccaaaacagagtgtgggactcactgctccctcgcctactagagcagagccactgccagaaggaaggggacaagacccagcaggacaccttctttccacgctttccagcctgtgggagcggcaggggcaacagagagaggatctggagccaggattaatgactcatttatgaagcatcttattctgcgaccgaggctcagtggtcagtggcgacgtaaatggctcgactccccgctggcattcgcttcatcatctcattctccagggatcagtggtacagagccttcatttttattttgacatttctgctgtatgcaagttttcacttatctcgaaagcctatcagcatagttaagggtgagctccacaagtactgcactgcttgggatgaagctgacgtcaggttcagcagccagaacaggaagtctgggtccgctgccccccaccagctccctgacaatgagaccgactgtggctgggcaccgtttgataagaacaactatcagcagctgcttggggccctggactactccttcctgtgcgcctatgccgtggggatgtacctcagtggcatcattggggagcgcctgccgattaggtattacctaactttcgggatgctcgccagcggagccttcaccgccctgttcggcttagggtatttctacaacatccacagtttcggattctacgtggtaactcaggtcatcaacgggctggtgcagaccaccggctggcccagcgtcgtcacctgcctcggcaactggtttggaaaaggaaggagaggtttgattatgggggtctggaactcccacacctccgtgggcaacatcttggggtcattgatcgctggctactgggtgtccacatgctggggcctgtccttcgtcgtgcctggagccatcgtggcagccatggggatagtgtgctttctcttcctcattgaacatccgaacgacgtcaggtgctcctccaccctggtgacgcactcaaaaggctatgagaatggtacaaacagattgagactccagaagcaaatcttgaagagcgaaaagaacaagcctctggacccagagatgcagtgcctgctgctctcagatgggaagggctccatccacccgaaccacgtcgtcattctccccggggacggtgggagtggcacggccgccatcagcttcacaggggccttgaaaattccaggcgtgatagagttctcactgtgtctgctgtttgccaagctggtcagctatactttcctcttctggctgcccctgtacatcacgaatgtggatcaccttgatgccaaaaaggcgggggagctctccaccctgtttgacgtgggcggaatctttggtgggatcctggcaggtgtgatctcagaccgactggagaaaagggcctccacctgcggcctgatgctgctgctcgcggcccccacgctctacatcttctccaccgtcagcaagatggggcttgaggccaccatcgccatgctgctgctcagcggagccctggtcagtgggccctacacactcatcaccaccgccgtctccgccgacctggggactcataaaagtctgaaaggcaacgcgcacgccctctccaccgtgacggccatcattgacgggacgggctctgtaggagcagccctgggccccctgctggctgggctcctctccccgtccggctggagcaatgtgttttacatgctgatgtttgcagatgcctgtgccttactgttcctgatccgcctcatacacaaggagctgagctgcccagggtcagctacgggggaccaagttccatttaaggaacagtgacaccccaccccagtcccgtggagggggtctgggcccacccttcacaactgcctttcaaggacagttcagacaaagggccctgcatggaaagagtgacctccctttgccttttgcacacgcacctggaaaagacacagaagccaacctgagaacccctggtgctattttaaaggagacatattgctgaacagcagtgagaaaagtctgcaggaactgctgcctgagccaagccagagaaccgaagacccggccggccctggcctcacaggcgtgtgcccatgcagccacccaaatgcacgcgtgacaacaaggccgggagggtggggggggtgcacaggtagccccgaccctctcaggcattccagccacagaacatcaaagtgagcgagtactgcgctggctgtggcttcagagaacctgtatgtgccacatggaaaaacaggacaccagagcccaccagacagtgccggccagcagagaagcagagagccagcgccacacaacatcaagaaggccgacaaccaggttggaaaccaagacggagctcagacccaccacatcgccccagaggcttttccagcacccatgatgtttcggactgacctaaaaactaattgtcgagaagccaagggtgaggaggcaggaagcacctccggttggaggcacccaggcttgccagccacagagcgccccaaagtcaccgtcatcccagcccctggccttcctgctgccctccggggccatggcactgctgttcagctcaggcacaggggcacagcagaggtttgggaagcggtctccccaccggcactgggattggcgggtccaagcccagcaaccggcttcgctccacaacacacaccacacctgggactgtttttaatacatagcaacagactgggttatttatttaagatgtgtattgtgtcatatgaagtttaagagacataaatggcattttgttatttattaagacaaactccaattgttctctggctgtttttttcagttgtgtctagcaaaatacttatctgccctttgaaataaaatgtttttgtttaaaaaatctcagaacactca

SEQ ID NO: 10270 - protein, 533 aa, Homo sapiens; identical to SEQ ID NO: 1307

SEQ ID NO: 10271 - DNA, 744 bp, Homo sapiens
gtgggaagttcgcgcaagtgcggctctgcagggaggagggagggccgaggggaaggccctcgagagagtggagggcaacagtggccacggttcctctgtacttcgtttcttccctttatagaattgagagattgctgagcctaaatacatgttgctgcattgcctccgagaatggccggacctatccccactctcaccaaaacagagtgtgggactcactgctccctcgcctactgcataaactcaagaggaatttacaacagatgggctcaggcaacaagttagccccagagtggagctcagctacagaggaatgcttcactgaaagaaatcttttctatggacctctggttttagagacaacatctagttctcttacatcccttgccacttcccctgatgctgtaggacagacaggtctgtcccacccacggtgactcagtcattgttgttcatggccgctgcccgttcttcacgatcaaggaggagaattctttggaggaaacagagctttcatacgtgaatcgactgggaagcgagtcaaaagtactgcaactggaagtgtggcatggggagggggccgtggccagtctcctcactgggctcctgtaggactgggaacgcctactccttcacacctaattatgtttgctggattgggttatagttcttcagtgtgtggactcttgtcagttttatatccgtaggccgagcacaatgcctggaatacagagcatgcttaat

SEQ ID NO: 10272 - protein, 57 aa, Homo sapiens
MGSGNKLAPEWSSATEECFTERNLFYGPLVLETTSSSLTSLATSPDAVGQTGLSHPR

SEQ ID NO: 10273 - DNA, 445 bp, Homo sapiens
aacagtggccacggttcctctgtacttcgtttcttccctttatagaattgagagattgctgagcctaaatacatgttgctgcattgcctccgagaatggccggacctatccccactctcaccaaaacagagtgtgggactcactgctccctcgcctactatgtaaccttcctagggatgctgtttctaactgctgccggccccttcttaccatctctctggttgtgcttctgacgcattccctacacaactggaacgtgtttccaggtcagcctccctaagcacctcccaaggcctccaccccacagtgtcgcacagaacttgacacataccagatgctccaattattaaatattactgagtacttttagaaaattgggaacatacaataaagtataatgaagaaaataaagaaaaccaataatctcacttcccaaagataataa

SEQ ID NO: 10274 - protein, 45 aa, Homo sapiens
MAGPIPTLTKTECGTHCSLAYYVTFLGMLFLTAAGPFLPSLWLCF

SEQ ID NO: 10275 - DNA, 389 bp, Homo sapiens
cccagagtggagctcagctacagaggaatgcttcactgaaagaaatgacagacaggtctgtcccacccacggtgactcagtcattgttgttcatggccgctgcccgttcttcacgatcaaggaggagaattctttggaggaaacagagctttcatacgtgaatcgactgggaagcgagtcaaaagtactgcaactggaagtgtggcatggggagggggccgtggccagtctcctcactgggctcctgtaggactgggaacgcctactccttcacacctaattatgtttgctggattgggttatagttcttcagtgtgtggactcttgtcagttttatatccgtaggccgagcacaatgcctggaatacagagcatgcttaataatcaga

SEQ ID NO: 10276 - protein, 38 aa, Homo sapiens
MTDRSVPPTVTQSLLFMAAARSSRSRRRILWRKQSFHT

SEQ ID NO: 10277 - DNA, 617 bp, Homo sapiens
ctgggctgcggagcgcgggcctcggcggcgcagggcttgacgcgccggaaagtcccctcgccgctggccaccagccttccagcccttacggcccacgccgtaatcctggtgaccgagaagagagcagagccactgccagaaggaaggggacaagacccagcaggacaccttctttccacgctttccagcctgtgggagcggcaggggcaacagagagaggatctggagccaggattaatgactcatttatgaagcatcttattctgcgaccgaggctcagtggtcagtggcgacgtaaatggctcgactccccgctggcattcgcttcatcatctcattctccagggatcagtggtacagagccttcatttttattttgacatttctgctgtatgcaagttttcacttatctcgaaagcctatcagcatagttaaggtaagaatcatggaaagcactgcctgtcgtctctgtgaggagttcgtcacttgaaaagcttgtggggcagaggatggggatggtagcaggtacatggggaaacagattatgtagaaacaagttattctgctgctttggcttttcggtttccctttgctaaaattaaagtcttttaaatgtt

SEQ ID NO: 10278 - protein, 63 aa, Homo sapiens
MARLPAGIRFIISFSRDQWYRAFIFILTFLLYASFHLSRKPISIVKVRIMESTACRLCEEFVT

SEQ ID NO: 10279 - DNA, 3664 bp, Homo sapiens
cggcggcgcaggtgaggcgcggggccggggccggaccgggaggcggggaccccccgcccccccgcccgcacctgcggggcagccggcgctcaggcgccgcagccgctcagcacctgcggcgccctcagggagccgggcgcggggccctgcgcactcggagctcggctcctctccttccttttcttttttttcggggggaggtgggggctggtttggatgttttccgagagccggggacggtctcaagctattttcgcggagggaagtctttgaaatacgacatctagaagagtggccctcggcgacaatgccgggcgttcccggaccggggcaacgctgggattccggggaagtggaggcagagggagcgggcacggggccggcagccgctccacggagtccccggcaggggcgagcttagctgtccagccgggtcccctgcccaccccggcccgggccgcggtgacagctgagggtccagagagccggcaggaggggaccctgcgcattgtctgccgcgatggggacgtgggcgtgcccgcggaattcacctcctccggggaccagccgcccagggaggagccggcacagaacgctggctcggagcgccggcaccctgggcctttgcgttgtttgtcggctgagcagctggttcccggagcccgtgggcctcctggccaatgcgagtgacagcgaccttctgggtttataataaagggcttgacgcgccggaaagtcccctcgccgctggccaccagccttccagcccttacggcccacgccgtaatcctggtgaccgagaagagagcagagccactgccagaaggaaggggacaagacccagcaggacaccttctttccacgctttccagcctgtgggagcggcaggggcaacagagagaggatctggagccaggattaatgactcatttatgaagcatcttattctgcgaccgaggctcagtggtcagtggcgacgtaaatggctcgactccccgctggcattcgcttcatcatctcattctccagggatcagtggtacagagccttcatttttattttgacatttctgctgtatgcaagttttcacttatctcgaaagcctatcagcatagttaagggtgagctccacaagtactgcactgcttgggatgaagctgacgtcaggttcagcagccagaacaggaagtctgggtccgctgccccccaccagctccctgacaatgagaccgactgtggctgggcaccgtttgataagaacaactatcagcagctgcttggggccctggactactccttcctgtgcgcctatgccgtggggatgtacctcagtggcatcattggggagcgcctgccgattaggtattacctaactttcgggatgctcgccagcggagccttcaccgccctgttcggcttagggtatttctacaacatccacagtttcggattctacgtggtaactcaggtcatcaacgggctggtgcagaccaccggctggcccagcgtcgtcacctgcctcggcaactggtttggaaaaggaaggagaggtttgattatgggggtctggaactcccacacctccgtgggcaacatcttggggtcattgatcgctggctactgggtgtccacatgctggggcctgtccttcgtcgtgcctggagccatcgtggcagccatggggatagtgtgctttctcttcctcattgaacatccgaacgacgtcaggtgctcctccaccctggtgacgcactcaaaaggctatgagaatggtacaaacagattgagactccagaagcaaatcttgaagagcgaaaagaacaagcctctggacccagagatgcagtgcctgctgctctcagatgggaagggctccatccacccgaaccacgtcgtcattctccccggggacggtgggagtggcacggccgccatcagcttcacaggggccttgaaaattccaggcgtgatagagttctcactgtgtctgctgtttgccaagctggtcagctatactttcctcttctggctgcccctgtacatcacgaatgtggatcaccttgatgccaaaaaggcgggggagctctccaccctgtttgacgtgggcggaatctttggtgggatcctggcaggtgtgatctcagaccgactggagaaaagggcctccacctgcggcctgatgctgctgctcgcggcccccacgctctacatcttctccaccgtcagcaagatggggcttgaggccaccatcgccatgctgctgctcagcggagccctggtcagtgggccctacacactcatcaccaccgccgtctccgccgacctggggactcataaaagtctgaaaggcaacgcgcacgccctctccaccgtgacggccatcattgacgggacgggctctgtaggagcagccctgggccccctgctggctgggctcctctccccgtccggctggagcaatgtgttttacatgctgatgtttgcagatgcctgtgccttactgttcctgatccgcctcatacacaaggagctgagctgcccagggtcagctacgggggaccaagttccatttaaggaacagtgacaccccaccccagtcccgtggagggggtctgggcccacccttcacaactgcctttcaaggacagttcagacaaagggccctgcatggaaagagtgacctccctttgccttttgcacacgcacctggaaaagacacagaagccaacctgagaacccctggtgctattttaaaggagacatattgctgaacagcagtgagaaaagtctgcaggaactgctgcctgagccaagccagagaaccgaagacccggccggccctggcctcacaggcgtgtgcccatgcagccacccaaatgcacgcgtgacaacaaggccgggagggtggggggggtgcacaggtagccccgaccctctcaggcattccagccacagaacatcaaagtgagcgagtactgcgctggctgtggcttcagagaacctgtatgtgccacatggaaaaacaggacaccagagcccaccagacagtgccggccagcagagaagcagagagccagcgccacacaacatcaagaaggccgacaaccaggttggaaaccaagacggagctcagacccaccacatcgccccagaggcttttccagcacccatgatgtttcggactgacctaaaaactaattgtcgagaagccaagggtgaggaggcaggaagcacctccggttggaggcacccaggcttgccagccacagagcgccccaaagtcaccgtcatcccagcccctggccttcctgctgccctccggggccatggcactgctgttcagctcaggcacaggggcacagcagaggtttgggaagcggtctccccaccggcactgggattggcgggtccaagcccagcaaccggcttcgctccacaacacacaccacacctgggactgtttttaatacatagcaacagactgggttatttatttaagatgtgtattgtgtcatatgaagtttaagagacataaatggcattttgttatttattaagacaaactccaattgttctctggctgtttttttcagttgtgtctagcaaaatacttatctgccctttgaaataaaatgtttttgtttaaaaaatctcagaacactca

SEQ ID NO: 10280 - protein, 533 aa, Homo sapiens; identical to SEQ ID NO: 1307

SEQ ID NO: 10281 - DNA, 1002 bp, Homo sapiens
ttcgcggagggaagtctttgaaatacgacatctagaagagtggccctcggcgacaatgccgggcgttcccggaccggggcaacgctgggattccggggaagtggaggcagagggagcgggcacggggccggcagccgctccacggagtccccggcaggggcgagcttagctgtccagccgggtcccctgcccaccccggcccgggccgcggtgacagctgagggtccagagagccggcaggaggggaccctgcgcattgtctgccgcgatggggacgtgggcgtgcccgcggaattcacctcctccggggaccagccgcccagggaggagccggcacagaacgctggctcggagcgccggcaccctgggcctttgcgttgtttgtcggctgagcagctggttcccggagcccgtgggcctcctggccaatgcgagtgacagcgaccttctgggtttataataaagggcttgacgcgccggaaagtcccctcgccgctggccaccagccttccagcccttacggcccacgccgtaatcctggtgaccgagaagagagcagagccactgccagaaggaaggggacaagacccagcaggacaccttctttccacgctttccagcctggtgggagtggcacggccgccatcagcttcacaggggccttgaaaattccaggcgtgatagagttctcactgtgtctgctgtttgccaagctggtcagctatactttcctcttctggctgcccctgtacatcacgaatgtggatcaccttgatgccaaaaaggcgggggagctctccaccctgtttgacgtgggcggaatctttggtgggatcctggcaggtgtgatctcagaccgactggagaaaagggcctccacctgcggcctgatgctgctgctcgcggcccccacggtcagccgtgctgccttccctgggccccaaagcctgcagacagtcccccactgtcctcctcgccagccagcatccttccatctggccc

SEQ ID NO: 10282 - protein, 190 aa, Homo sapiens
MRVTATFWVYNKGLDAPESPLAAGHQPSSPYGPRRNPGDREESRATARRKGTRPSRTPSFHAFQPGGSGTAAISFTGALKIPGVIEFSLCLLFAKLVSYTFLFWLPLYITNVDHLDAKKAGELSTLFDVGGIFGGILAGVISDRLEKRASTCGLMLLLAAPTVSRAAFPGPQSLQTVPHCPPRQPASFHL

SEQ ID NO: 10283 - DNA, 3153 bp, Homo sapiens
tatgccaccagaagacgagcctcgggagcagttttagttctaagagctccaagctgaaagccgactgcctgtcatccttgaccacctgtccacaaggaagaaggggtacattttcctagattcacacaactgaatgctacacacccgtgaaaaagaacaagttacaggtccaggcaacaatgaggatgaacctcacaaacataacatgaagcagaaggaggcagacatgaaagagtacagactgcagcattccactcataggaagtccaagcatgggcaacgaatccatgcggctagagatggagtttcactttgtcgcccaggctggagggcaatggtgcgctctcggctcactgcaaacttcgcctcccggattcaagctattctcctgcctcagcctccccagtagctgggattacaggcgcctgtcaccatgcctggttaattttttttgtatttttagtatagatagggtttcactatgttggccagtttggtcttgaactcctgacctcaggtgatccgcccacctcggcctcccaaagtgctgggattacaggcgtgagccactgcgcctagccagttttctccttttaagtcctgtgtgtccagagaggggtgggcacactcacattcaaatcaatgctgccatccccctggctccagggacccctgcagtttaagcttctccgggaagcctctgctttcaggtttcttttctggcccagtccaggtgaaaagagctcgcactaagatctctgctgggagtcagactcacctgtctaccagcttgggcagacgcttgccttgagtcctgaggctaggccacagctggagcagcagatagaagggacagggttgcacttataacaccactatcctcccagccctggttttatcatcatcatcgagaaaaatacaattaatcagcagtgatcaaaggtaagtctaaacattccatttaactaacttaaatgtgacctggtgtgccgtgtcattctataaatgacataacagaataagactcactttctaattcacagcctctggttcaatttcaagtaagcaaatacattttgctttggttttgcttacaatattctgggaaatgcaggctataaataatcactcaactgttttgtgggtcaacagaatcactactactttcagtttcgttgatgccatttatatcatgagctcaagcacacgggcgcttcagaaggcactataaagtttagttttgatgtggtgtgatgttctgatctatcttgaaaggtaaagaaacccacaggattcagcgtcaagccaatccatgcccaggcacatcgcagctgctaggtcaggaaatctgtgcgtttaggaggctctgagggtgatgctgggactgtactcaggtaattaaacccggacaaaccctgaggcacagagaggatgagtaggggccctggaggcagcctgacccacagggaattctcgagtgtgtggcagccctgcctggggaacgaagacccgagcctcaatttcctcacaggggcactcgcagggttgctgtgaggatcacaggggtaatgtatgtggcagtttgtcataccccagggctctgtaagcggcagttatttatattgttacttatgacactgaactaagagctgaccctgacgccgcctcctcagaagccctaagtcttgagtggcctggacaccactacacacgagagtcaggggcgggggctttgagatggaccaccaggaaagccgggagagggaccgggacagggctcccacttgctcctggctcacaggggccctcatagtcatcaggtggaccccaacagctgtggcctgacaaagattcccccaaaggccagcccaccttacacgctacatctgccccaacagccccccagcccaacaggtggtgccttcatggagatgcccatccctgcacgtagcactcaaggcagttctcccacctgtaaagctgtttttcttcccctacaatccacacccaacctttctaggtcaatcctgaaaccccacacaagctccccaactacaccagatccttcaactccaacacgctcaccaagtctcttcaatagtcacttccatctttataatttaccattttcttgagctgtttgtatatttctctaaccagaaagacaagaagtagtagtattcagatttataatgactggttactggtactgatttgagagtttcttgtcaagcggatgagtgtttaaggcccaccacctcttttcatattcttctctcttaaaaaccacattttcaaaggtctgcaaacgttttccacagtcaacaacttgagaggcatggaagtttcttgcttatcaggggccaagggggaattttagaatcttttgggtaaatgaatgtttaacatcccctgaaagctgctggagagtggggaacctaggaccgtcacaaaacagccagcctctgcattgcctctgccgaccagggctgcagagggcagccacccagggctcagccaccggcaggagtggaggaagcacagctccaaaggtcacagaattgcagtcctggagctgggtccctgccaactcccggagagtgagcgaggggccactgggctgtgaatgcactgtctctggcagtggatgatttcctcgttcttctacgatagagactctaatgcctctcaggcccctgatggtctacaggccgggtgacgtaatcccaatgagggtaagaaaattattcctgcttttctccaggttataactggtgattatgtaggcttgtctgctttaatcttcttttctcaaagtctagtagaacacctgcttaacaacttcctgcccacccatcactcagacaaaaatgcagcctttccatgattcttaccttaactatgctgataggctttcgagataagtgaaaacttgcatacagcagaaatgtcaaaataaaaatgaaggctctgtacctgaaacacaaaacagtgggagaggatgatatgaaataacagaagttatgttaggaatacatatcactgtgttctgaaacgttcttatgctgtgtattattcattcagttctacagccattatcaatattacttatgtcactataatattggaacattaaaaaatattgccacgttt

SEQ ID NO: 10284 - protein, 91 aa, Homo sapiens
MLHTREKEQVTGPGNNEDEPHKHNMKQKEADMKEYRLQHSTHRKSKHGQRIHAARDGVSLCRPGWRAMVRSRLTANFASRIQAILLPQPPQ

SEQ ID NO: 10285 - DNA, 642 bp, Homo sapiens
agaaaaccgccaggagtcacagcgcgacgagtgtgcggggaaggcggcggggccgggagtcacagcgcgacgagtgtgcggggaaggcggtggggctgggagctggcaatgtcttctgtctacagactccctcgccacatccagccctccccacccctcccactggcagcgagaggaaatcccgtccggggagcagcaggcagctgcggtgggaatttcatgacactagaaaagactggactcctccctcatcctacacctgcagagccccacgcagtcatttaggcacaaacattcactgtattcgcctgcattccatgaaggctccgttctttccatgctgaatttgagccacttcgcagacagaagtggccctgggttctcagccccacctaagttgcctaagactacagccacgcgacacattctctgcagcagatggagtttcactttgtcgcccaggctggagggcaatggtgcgctctcggctcactgcaaacttcgcctcccggattcaagctattctcctgcctcagcctccccagtagctgggattacaggcgcctgtcaccatgcctggttaattttttttgtatttttagtatagatagggtttcactatgttggccagtttggtcttga

SEQ ID NO: 10286 - protein, 89 aa, Homo sapiens
MLNLSHFADRSGPGFSAPPKLPKTTATRHILCSRWSFTLSPRLEGNGALSAHCKLRLPDSSYSPASASPVAGITGACHHAWLIFFVFLV

SEQ ID NO: 10287 - DNA, 591 bp, Homo sapiens
tccagacacgtactggggagggtgctgcaccgctgtgtggtgtagtgaggacgcgggaacagtggagcgctcaccccgagcaggggcaccagggaggggcggggcctctgagaagggtggggccccagctgcagctcctcggccactgtcacatggggtgcaggcccagcgtggccagattttctacttttcaagtgaagacaggaagccctgtttatctacggcgtttctgaatttcgaaatggagttcaggatcaaaacccagtgtctttacatcagagtcgagtcaatgcaaacatggacgggtttgattttcatactacatcgcctggaaaacttagctattaaaagagttctcgtatagccgggtgcagtggactgagtatcgaatggctccttcttcttccctggaactgaaatcattgtacattatcaagccacctggaaacacacagatgaaacaattccgaccattgtgtcagcacacaggcgtacaggctaccgcatcccgccttgttgtgtcaacaagcgagagctgtgtctgctccctggtgctgtggctgtcagtgctggagagcacggcctggacag

SEQ ID NO: 10288 - protein, 66 aa, Homo sapiens
MAPSSSLELKSLYIIKPPGNTQMKQFRPLCQHTGVQATASRLVVSTSESCVCSLVLWLSVLESTAW

SEQ ID NO: 10289 - DNA, 1410 bp, Homo sapiens
tgagaagcggcgggcagggtggccgttgccatgtcatgcgacacacggcctggttctgagaagtggtgggcagggtggctgttgccatttgtcatgcgacacacggcctggttctgagaagtggtgggcagggtggctgttgctcagaaagccacactttggcttttgctgttcaccaaagtgagaccagaccagcctcgtctctgcccttcatgttggttccttcctttcactggatccagaggggctttgagtgtattgggtggcggcagtagtcacccctctgatcttctgtcttgggcatctcagtaggaagtcgggggactgcggggctgagctcagttctggttgacgttgtgactgcgtggccttctcttggccttgtgcctcagtggactgcagtctgcaattcggtctgactctgctgtgaaaccctgttcttaaagctaacttggcgctctactggcaaccccgattgctgttttaaaagcagaggatcagcataaaaaaagagaaggaaatcatgaactaggtgaaaaaacacatttttcttcatattctcaaaatgagagggaagcagaagtctgtggctaagggtggagaccctgcgtctgtgaacagaggccactgcccaccactgcccccaagcaggtggagggaggcacagttctgaatgcctttggcccctcacaaggaaggtggcacacacaccggaccccctctggccttctgttaacctgcaccaagtcctgactgtccgcggagctgccgcgcccaccttgatggctgctgcgttacaccagaggcaggaccaggacctgactcctccaggctccactgcccatcagtgcctgctgcctgctcagtgaatggtcaccatggaaacggcgctcaggcctacccacccccaccaccacgccttggtcattgttccttccatgagtgagtgctgcccagcaagacaaagtacaggctccagtgggaaggccaccatgtcagccaagtcccttcccgaaggaggtgcccgcatgcttattcagtgtcactgtccactccttggcagtgactcgggtggaggcgaaacatgactaatcgtaaatcacccctgccttctcccaagtgccacacggtttgttgacacggtgtgcgcctggggcgttcacagtgcttagaatcgcagaggttgccgtttctgtacatttcatgcagagcaattaaatagggcactgcatttttcttcaagttaatttttatttattaaagtaaaacataatgtaccttagaagctagacagtcctacaagcttattatgttgtacagcggcgttccgtccccctccccagccctctctttctagaggcagccaatttcagctgcctctctctgcttacctacgtatttccatgtttc

SEQ ID NO: 10290 - protein, 72 aa, Homo sapiens
MVTMETALRPTHPHHHALVIVPSMSECCPARQSTGSSGKATMSAKSLPEGGARMLIQCHCPLLGSDSGGGET

SEQ ID NO: 10291 - DNA, 657 bp, Homo sapiens
atacacatgtaggatggcctgttttggtagatgcatgggaaaaagcatgaagaatttccaccaacctatgaactgacatattcaactctgagagaacttccaggtaaacatggtcggctactcatgtgttatctccacacccccaagcaacatgaactgcgccatcactgacttctaaagatgataaatcctcccaccgaagggcacgtagttttggaagatggacacagaagggctgacagctaacacagcctccagtgttccctgctccactgagcatcctcagagggagacagcacagggacacctggagcagagcgaggcccagcggagcccaagagacaggggaggggaaggcaaggaaggaggaacgcagtgggaacggaagggggtcagcaagagaaaaaaggtgcatgggttgagtcttttatcacaaactgttagctacattccctctgccgcacctcggatcccaggtctcttttctcatcctcactgataaagagactcctcctgatgcccccgtgcaggacagcgcagcttaacccgtggggacactaagcccagtgcaggacagggatgctcacctaacaggcgacaggggatctggggaaagacaccagcttccaccaagcttccatgccatggcaaggatgt

SEQ ID NO: 10292 - protein, 46 aa, Homo sapiens
MHGKKHEEFPPTYELTYSTLRELPGKHGRLLMCYLHTPKQHELRHH

SEQ ID NO: 10293 - DNA, 901 bp, Homo sapiens
gggtctgggcccacccttcacaactgcctttcaaggacagttcagacaaagggccctgcatggaaagagtgacctccctttgccttttgcacacgcacctggaaaagacacagaagccaacctgagaacccctggtgctattttaaaggagacatattgctgaacagcagtgagaaaagtctgcaggaactgctgcctgagccaagccagagaaccgaagacccggccggccctggcctcacaggcgtgtgcccatgcagccacccaaatgcacgcgtgacaacaaggccgggagggtggggggggtgcacaggtagccccgaccctctcaggcattccagccacagaacatcaaagtgagcgagtactgcgctggctgtggcttcagagaacctgtatgtgccacatggaaaaacaggacaccagagcccaccagacagtgccggccagcagagaagcagagagccagcgccacacaacatcaagaaggccgacaaccaggttggaaaccaagacggagctcagacccaccacatcgccccagaggcttttccagcacccatgatgtttcggactgacctaaaaactaattgtcgagaagccaagggtgaggaggcaggaacggtctccccaccggcactgggattggcgggtccaagcccagcaaccggcttcgctccacaacacacaccacacctgggactgtttttaatacatagcaacagactgggttatttatttaagatgtgtattgtgtcatatgaagtttaagagacataaatggcattttgttatttattaagacaaactccaattgttctctggctgtttttttcagttgtgtctagcaaaatacttatctgccctttgaaataaaatgtttttgtttaaaaaatctcag

SEQ ID NO: 10294 - protein, 69 aa, Homo sapiens
MMFRTDLKTNCREAKGEEAGTVSPPALGLAGPSPATGFAPQHTPHLGLFLIHSNRLGYLFKMCIVSYEV

SEQ ID NO: 10295 - DNA, 894 bp, Homo sapiens
gggtctgggcccacccttcacaactgcctttcaaggacagttcagacaaagggccctgcatggaaagagtgacctccctttgccttttgcacacgcacctggaaaagacacagaagccaacctgagaacccctggtgctattttaaaggagacatattgctgaacagcagtgagaaaagtctgcaggaactgctgcctgagccaagccagagaaccgaagacccggccggccctggcctcacaggcgtgtgcccatgcagccacccaaatgcacgcgtgacaacaaggccgggagggtggggggggtgcacaggtagccccgaccctctcaggcattccagccacagaacatcaaagtgagcgagtactgcgctggctgtggcttcagagaacctgtatgtgccacatggaaaaacaggacaccagagcccaccagacagtgccggccagcagagaagcagagagccagcgccacacaacatcaagaaggcttgccagccacagagcgccccaaagtcaccgtcatcccagcccctggccttcctgctgccctccggggccatggcactgctgttcagctcaggcacaggggcacagcagaggtttgggaagcggtctccccaccggcactgggattggcgggtccaagcccagcaaccggcttcgctccacaacacacaccacacctgggactgtttttaatacatagcaacagactgggttatttatttaagatgtgtattgtgtcatatgaagtttaagagacataaatggcattttgttatttattaagacaaactccaattgttctctggctgtttttttcagttgtgtctagcaaaatacttatctgccctttgaaataaaatgtttttgtttaaaaaatctcagaac

SEQ ID NO: 10296 - protein, 103 aa, Homo sapiens
MCHMEKQDTRAHQTVPASREAESQRHTTSRRLASHRAPQSHRHPSPWPSCCPPGPWHCCSAQAQGHSRGLGSGLPTGTGIGGSKPSNRLRSTTHTTPGTVFNT

SEQ ID NO: 10297 - DNA, 831 bp, Homo sapiens
gggtctgggcccacccttcacaactgcctttcaaggacagttcagacaaagggccctgcatggaaagagtgacctccctttgccttttgcacacgcacctggaaaagacacagaagccaacctgagaacccctggtgctattttaaaggagacatattgctgaacagcagtgagaaaagtctgcaggaactgctgcctgagccaagccagagaaccgaagacccggccggccctggcctcacaggcgtgtgcccatgcagccacccaaatgcacgcgtgacaacaaggccgggagggtggggggggtgcacaggtagccccgaccctctcaggcattccagccacagaacatcaaagtgagcgagtactgcgctggctgtggcttcagagaacctgtatgtgccacatggaaaaacaggacaccagagcccaccagacagtgccggccagcagagaagcagagagccagcgccacactgctgccctccggggccatggcactgctgttcagctcaggcacaggggcacagcagaggtttgggaagcggtctccccaccggcactgggattggcgggtccaagcccagcaaccggcttcgctccacaacacacaccacacctgggactgtttttaatacatagcaacagactgggttatttatttaagatgtgtattgtgtcatatgaagtttaagagacataaatggcattttgttatttattaagacaaactccaattgttctctggctgtttttttcagttgtgtctagcaaaatacttatctgccctttgaaataaaatgtttttgtttaaaaaatctcagaacactc

SEQ ID NO: 10298 - protein, 98 aa, Homo sapiens
MCHMEKQDTRAHQTVPASREAESQRHTAALRGHGTAVQLRHRGTAEVWEAVSPPALGLAGPSPATGFAPQHTPHLGLFLIHSNRLGYLFKMCIVSYEV

SEQ ID NO: 10299 - DNA, 541 bp, Homo sapiens
ctgcatggaaagagtgacctccctttgccttttgcacacgcacctggaaaagacacagaagccaacctgagaacccctggtgctattttaaaggagacatattgctgaacagcagtgagaaaagtctgcaggaactgctgcctgagccaagccagagaaccgaagaccgtcatcccagcccctggccttcctgctgccctccggggccatggcactgctgttcagctcaggcacaggggcacagcagaggtttgggaagcggtctccccaccggcactgggattggcgggtccaagcccagcaaccggcttcgctccacaacacacaccacacctgggactgtttttaatacatagcaacagactgggttatttatttaagatgtgtattgtgtcatatgaagtttaagagacataaatggcattttgttatttattaagacaaactccaattgttctctggctgtttttttcagttgtgtctagcaaaatacttatctgccctttgaaataaaatgtttttgtttaaaaaatctcagaac

SEQ ID NO: 10300 - protein, 46 aa, Homo sapiens
MALLFSSGTGAQQRFGKRSPHRHWDWRVQAQQPASLHNTHHTWDCF

SEQ ID NO: 10301 - DNA, 1835 bp, Homo sapiens
caggtcctgtgacaacaggtacgggccagcattgggacaggctttgcctgtaagagggctggtctggggggacatctgaacccaattcaggaacacctcacaggtctgccagcagggctagacccggggtgagatccagggcaacagggtctgcctgggaagctcagctccggcactgcctggggcgtctctgcctacacaggaccattcctctcgcctggactcctcttggagtttgccaaggctggcctctgcagaaataggagactcctggaggaagacagtggacttcagcaagctgcaccaaggagaatccacagcggcagctgccctgccaggcgcgggatctcggtcaaggtggatcaacacagcctcaggtgtgtgctctgccccactgagatggcaagtgcattcttttctattcctacgaggaaagagcatccgaaagagcctgccttcacataggatgaataacagtggaccttggctttgcctcagtgttatgtgctaataaaccatgtattctatgccctaaggaagcccagagagaactggacaagctggatatcccaaagagcatggcactggcccaccacattgattacattgcgctggccgggtgctaaccaagaagcagctaacacactgggagtcttggtaagatgcctgagtgcctgcagctggcagacaaatcctacaaagattctgggaactgccactaataacactcttggtggggaggtcccatatcccataaccaggagcatactgggcctcctgtccacagcaaagagccaattactgcatcttgcatctcccatgaccaagagagacagacaatgccagtacgccttctggaggcagcacgttccacacacatgaagactactccagcctatgtaccattgataggagaagctgtcggccttccctgagcctgcagcaggtcgaggctgcagtgctggcagccctgtgactcaggccctgcagctggtcggaccctgtgttatgagaggtatcagacgtgggaaagcaatgctgtgtgtttatggcaaaccactatgccagaatcacagtgcaggcccctgggattcagaaacaaagccgtgccatctgcggcagaggattctgcgaaaaattctgaaaagtccctgttgatgtgctcctggggcctggggtgatggaatacctgattgtgcatgtggaactgctcagatgagctggattctgtctcacccctgggtcatgaggttggggactcagaaataacccatcacaggtgggagtgtgcgtgtggcagcagcagaagcaggagcaggaggccaagcagcggcagctgcccagtacccccccccaccctccacagcagtccccacagccccagtggaggaaccttctggtgaactgaggagggagggacaagcccggcctcagttcatggaggtgtctgctctgcctgtggggccagcccaaatcgcctggctgccatactccagtctcagcaagctgccctttaaagagggtgatatggtttggctctgtgtccccacccaaatctcatcttgaactgtaatccccaggtgatgagggtgagacctgatgggaagtgattggatcatgggggctgttttccccatgctgttctcgtgatagtgaaggagttctcatgagatctgatggttttataagtgtctggcaattcccctgcttgcacttgtctttctcacccaccaccacgtaagacgtgcctgcttccccttccgccatgattgtaagtttcctgaggcgtccccagccatgcagaactgtgagtcaatgaaacctcttttctttat

SEQ ID NO: 10302 - protein, 67 aa, Homo sapiens
MWNCSDELDSVSPLGHEVGDSEITHHRWECACGSSRSRSRRPSSGSCPVPPPTLHSSPHSPSGGTFW

SEQ ID NO: 10303 - DNA, 1686 bp, Homo sapiens
caggtcctgtgacaacaggtacgggccagcattgggacaggctttgcctgtaagagggctggtctggggggacatctgaacccaattcaggaacacctcacaggtctgccagcagggctagacccggggtgagatccagggcaacagggtctgcctgggaagctcagctccggcactgcctggggcgtctctgcctacacaggaccattcctctcgcctggactcctcttggagtttgccaaggctggcctctgcagaaataggagactcctggaggaagacagtggacttcagcaagctgcaccaaggagaatccacagcggcagctgccctgccaggcgcgggatctcggtcaaggtggatcaacacagcctcaggtgtgtgctctgccccactgagatggcaagtgcattcttttctattcctacgaggaaagagcatccgaaagagcctgccttcacataggatgaataacagtggaccttggctttgcctcagtgttatgtgctaataaaccatgtattctatgccctaaggaagcccagagagaactggacaagctggatatcccaaagagcatggcactggcccaccacattgattacattgcgctggccgggtgctaaccaagaagcagctaacacactgggagtcttggtaagatgcctgagtgcctgcagctggcagacaaatcctacaaagattctgggaactgccactaataacactcttggtggggaggtcccatatcccataaccaggagcatactgggcctcctgtccacagcaaagagccaattactgcatcttgcatctcccatgaccaagagagacagacaatgccagtacgccttctggaggcagcacgttccacacacatgaagactactccagcctatgtaccattgataggagaagctgtcggccttccctgagcctgcagcaggtcgaggctgcagtgctggcagccctgtgactcaggccctgcagctggtcggaccctgtgttatgagaggtatcagacgtgggaaagcaatgctgtgtgtttatggcaaaccactatgccagaatcacagtgcaggcccctgggattcagaaacaaagccgtgccatctgcggcagaggattctgcgaaaaattctgaaaagtccctgttgatgtgctcctggggcctggggtgatggaatacctgattgtgcatgtggaactgctcagatgagctggattctgtctcacccctgggtcatgaggttggggactcagaaataacccatcacaggtgggagtgtgcgtgtggcagcagcagaagcaggagcaggaggccaagcagcggcagctgcccagtacccccccccaccctccacagcagtccccacagccccagtggaggaaccttctggtgaactgaggagggagggacaagcccggcctcagttcatggaggtgtctgctctgcctgtggggccagcccaaatcgcctggctgccatactccagtctcagcaagctgccctttaaagagggtgatatggtttggctctgtgtccccacccaaatctcatcttgaactgtaatccccaggtgatgagggtgagacctgatgggaagtgattggatcatgggggctgttttccccatgctgttctcgtgatagtgaaggagttctcatgagatctgatggttttat

SEQ ID NO: 10304 - protein, 67 aa, Homo sapiens; identical to SEQ ID NO: 10302

SEQ ID NO: 10305 - DNA, 706 bp, Homo sapiens
cctcttccgagctgggggtggtgcagggggttggggaaaaatcagttcatcaaacaagcaaaatgtattcagcgcctgcttgctgtagaccaggcactgggcagggcttgtgaaacggaattggagccctctggaccctggaaaccttatgggagagagttaaaataaatcagacaggcagaggtaaggcactttaccttccgaaaggtgcaccattgaacaccaagaggaatcagcctgtcttgtacgtgtataatgaacctgccacgacgagctcttcaggataaccactgggcgggatgcaccaagaatcagagaaagggggtgccctttgacctgaagaggctggcattctctgggggagaccgacaagatgggatcaataaatagacgggcagatggtctgcccttgacttttgtgcaaaaggagaagacactggcacaaagatctcacttccgtgtctgttgtagtagtattgattctcctggctcagcctccccgagtagctgggattacaggcatctgccaccatgcccagttaatttatgtatttttagtagggacggggtttcaccatgttggtcaggctggtcttgaactcttgacctcaggtgatcctcctgcctgggcctcccaaagtgctgggattacaagcgtgagccactgcgcctggccaaaagtgtgttttttacacctttgtgtgct

SEQ ID NO: 10306 - protein, 74 aa, Homo sapiens
MGSINRRADGLPLTFVQKEKTLAQRSHFRVCCSSIDSPGSASPSSWDYRHLPPCPVNLCIFSRDGVSPCWSGWS

SEQ ID NO: 10307 - DNA, 2820 bp, Homo sapiens
aggtgacgggggcaaccccgcgtggtcacacgagtgacttgaggtcactcttcctccactgcatgccttgcaggaggcggtgcagagggccatggtctgacgtgggttttcacaggatcctcttggatgctggaggagggtgcatggaaggggccaggcagggaggccagtgagcagcagctgcagtcagctttgcaaagtgtgatgggacttggaccacggtcaggtggacccatgagttggggtccttcagagaagcagaccaatagtgaggagttggctcacatgaggacggaggctgagaagtcctgccagctaccgcctgcaagccggagccccgggaaagctggtggtgtggctccagtgcaagcctgagggcagcacccgggagctgatggtggggacccagtcccagggcaggagaaggccagtgtcccagcccaagcaggcaggtgggaggaaagaggcaagttcctccttcctctgccttcttgttctcttcagcccttcaaggggttgcatgatcccatgcacacagggaggcatctgctcgccacagtccaccactgcaaacgctggtctcagccagaggcacctcacagactcccccagaaacagcgcatccccagctattgggcatcccgggctggccaggtggacacacagacctcaccagtgcagtcatgctcgttggtcctgaacagccttggtggggaaggttccagaagtggcgcctgctctgtgccccccacatcagccccagggtctcctggtatcctaaacctacatccctgctcctggcccggctgtcgggaatgcagccaatgttcgttcctcagaatcaagataaaaacgaagggaacctcctgcctctgccaggcaggccgcaggccaggctggggaccccgggtggggtcgaggctggggagcctgggtggggatgaggctggggaccctgggtagggtcgaggctggccaccctgggtggggtcgaggctggggaccctgggtggggacgaggctggagaccctggctggggtcgaggctggggaccctgggtggggttgaggctggggaccttgggtggggatgaggctggggacccttggggggacgaggctggggacgctggctggggtcgaatgcctcctcagctcaggccttgggtctttggggaacgtggtgactgagttcatatatgcatgagcgacgtttccaactgtctggaaacttcagacagagtgtgagattctgcccgtgtgtcacagggaaggaggctggagatggaggagattctggaggtaccaagcccccgcgctcccaagagccgagtgggtccagcctctgcctccactctctgcccagactgcactttcttctggtaccttccagggtgcacacaggctcattcctgtatgcagagctccctctttaattcccaaaaagatcacaccaaaggagagtttcaaattagggcatcagagccaaattgaagattggaggagctgagtccggaagaagggccaagactgcggagtgaggagctggttgctggttcccaggtccctggccagctcaccgtctccagcaagaaagggacaagcgaaggcacatgaggagaagagaagggtctggcctatccttgaagagtgatcaccttcccacgagattggaatactgggaaggaaagtccgagcaccccgggaaagtctaaagggggttcccaaaggcaaaagaaggtgtccaggcagcgtgtcctgccacggccagcagctcccagcatgtgctctagccgtcctggcctggcgggtcagagccatggtcagtggcagctactgaaccattgcccgtgggcatcatctgcctgttctctcttgggtctaaccagcatttctcgtgactattctgaaaagactccagtcacttcctccaccacctcttccgagctgggggtggtgcagggggttggggaaaaatcagttcatcaaacaagcaaaatgtattcagcgcctgcttgctgtagaccaggcactgggcagggcttgtgaaacggaattggagccctctggaccctggaaaccttatgggagagagttaaaataaatcagacaggcagaggtaaggcactttaccttccgaaaggtgcaccattgaacaccaagaggaatcagcctgtcttgtacgtgtataatgaacctgccacgacgagctcttcaggataaccactgggcgggatgcaccaagaatcagagaaagggggtgccctttgacctgaagaggctggcattctctgggggagaccgacaagatgggatcaataaatagacgggcagatggtctgcccttgacttttgtgcaaaaggagaagacactggcacaaagatctcacttccgtgtctgttgtagtagtatttgatttatataccctccacctgtttctttttatggtcttggtaattgcaaaattattactagttgtaaatatttcaaacaatgtggtagaaaaggcaaagtccctcttctagtagagaaaatggaggccgggcacagtggctcatgcctgtaatcccagcactttgggaggccgaggagggcagatcacaaggtcaagagattgagaccatcctggccaacatggcgaaactacatctctactaaaaatacaaaaattagctgggcgtggtggcgcgtccctgtagtcccagctactcgggaggctgaggtaggagaatcacttgaacctgggaggtggaggttgcagtgagccgagatcgtgccattgcactccagcctgggcgacaagagtgaaattccacctc

SEQ ID NO: 10308 - protein, 144 aa, Homo sapiens
MHTGRHLLATVHHCKRWSQPEAPHRLPQKQRIPSYWASRAGQVDTQTSPVQSCSLVLNSLGGEGSRSGACSVPPTSAPGSPGILNLHPCSWPGCRECSQCSFLRIKIKTKGTSCLCQAGRRPGWGPRVGSRLGSLGGDEAGDPG

SEQ ID NO: 10309 - DNA, 2012 bp, Homo sapiens
gccgagcggaggagaccctgcggcgcgcggcggcggctcccgggcgtcccgggcccggtggcggcgcggctgtggttggctgagcgccgcgggccgccccccgcccgccccctcccctgctcccctcccccgcctcccgcggcggctggcgtcgggaaagtacagtaaaaagtccgagtgcagccgccgggcgcaggatgggatccggctcctccagctaccggcccaaggccatctacctggacatcgatggacgcattcagaaggtaatcttcagcaagtactgcaactccagcgacatcatggacctgttctgcatcgccaccggcctgcctcggaacacgaccatctccctgctgaccaccgacgacgccatggtctccatcgaccccaccatgcccgcgaattcagaacgcactccgtacaaagtgagacctgtggccatcaagcaactctccgagagagaagaattaatccagagcgtgctggcgcaggttgcagagcagttctcaagagcattcaaaatcaatgaactgaaagctgaagttgcaaatcacttggctgtcctagagaaacgcgtggaattggaaggactaaaagtggtggagattgagaaatgcaagagtgacattaagaagatgagggaggagctggcggccagaagcagcaggaccaactgcccctgtaagtacagttttttggataaccacaagaagttgactcctcgacgcgatgttcccacttaccccaagtacctgctctctccagagaccatcgaggccctgcggaagccgacctttgacgtctggctttgggagcccaatgagatgctgagctgcctggagcacatgtaccacgacctcgggctggtcagggacttcagcatcaaccctgtcaccctcaggaggtggctgttctgcgtccacgacaactacagaaacaaccccttccacaacttccggcactgcttctgcgtggcccagatgatgtacagcatggtctggctctgcagtctccaggagaagttctcacaaacggatatcctgatcctaatgacagcggccatctgccacgatctggaccatcccggctacaacaacacgtaccagatcaatgcccgcacagagctggcggtccgctacaatgacatctcaccgctggagaaccaccactgcgccgtggccttccagatcctcgccgagcctgagtgcaacatcttctccaacatcccacctgatgggttcaagcagatccgacagggaatgatcacattaatcttggccactgacatggcaagacatgcagaaattatggattctttcaaagagaaaatggagaattttgactacagcaacgaggagcacatgaccctgctgaagatgattttgataaaatgctgtgatatctctaacgaggtccgtccaatggaagtcgcagagccttgggtggactgtttattagaggaatattttatgcagagcgaccgtgagaagtcagaaggccttcctgtggcaccgttcatggaccgagacaaagtgaccaaggccacagcccagattgggttcatcaagtttgtcctgatcccaatgtttgaaacagtgaccaagctcttccccatggttgaggagatcatgctgcagccactttgggaatcccgagatcgctacgaggagctgaagcggatagatgacgccatgaaagagttacagaagaagactgacagcttgacgtctggggccaccgagaagtccagagagagaagcagagatgtgaaaaacagtgaaggagactgtgcctgaggaaagcggggggcgtggctgcagttctggacgggctggccgagctgcgcgggatccttgtgcagggaagagctgccctgggcacctggcaccacaagaccatgttttctaagaaccattttgttcactgatacaaaaaaaaaaaaaggaattcatgatgctgtacagaattttatttttaaactgtcttttaaataatatattcttatacgg

SEQ ID NO: 10310 - protein, 533 aa, Homo sapiens
MGSGSSSYRPKAIYLDIDGRIQKVIFSKYCNSSDIMDLFCIATGLPRNTTISLLTTDDAMVSIDPTMPANSERTPYKVRPVAIKQLSEREELIQSVLAQVAEQFSRAFKINELKAEVANHLAVLEKRVELEGLKVVEIEKCKSDIKKMREELAARSSRTNCPCKYSFLDNHKKLTPRRDVPTYPKYLLSPETIEALRKPTFDVWLWEPNEMLSCLEHMYHDLGLVRDFSINPVTLRRWLFCVHDNYRNNPFHNFRHCFCVAQMMYSMVWLCSLQEKFSQTDILILMTAAICHDLDHPGYNNTYQINARTELAVRYNDISPLENHHCAVAFQILAEPECNIFSNIPPDGFKQIRQGMITLILATDMARHAEIMDSFKEKMENFDYSNEEHMTLLKMILIKCCDISNEVRPMEVAEPWVDCLLEEYFMQSDREKSEGLPVAPFMDRDKVTKATAQIGFIKFVLIPMFETVTKLFPMVEEIMLQPLWESRDRYEELKRIDDAMKELQKKTDSLTSGATEKSRERSRDVKNSEGDCA

SEQ ID NO: 10311 - DNA, 2107 bp, Homo sapiens
gccgagcggaggagaccctgcggcgcgcggcggcggctcccgggcgtcccgggcccggtggcggcgcggctgtggttggctgagcgccgcgggccgccccccgcccgccccctcccctgctcccctcccccgcctcccgcggcggctggcgtcgggaaagtacagtaaaaagtccgagtgcagccgccgggcgcaggatgggatccggctcctccagctaccggcccaaggccatctacctggacatcgatggacgcattcagaaggtaatcttcagcaagtactgcaactccagcgacatcatggacctgttctgcatcgccaccggcctgcctcggaacacgaccatctccctgctgaccaccgacgacgccatggtctccatcgaccccaccatgcccgcgaattcagaacgcactccgtacaaagtgagacctgtggccatcaagcaactctccgagagagaagaattaatccagagcgtgctggcgcaggttgcagagcagttctcaagagcattcaaaatcaatgaactgaaagctgaagttgcaaatcacttggctgtcctagagaaacgcgtggaattggaaggactaaaagtggtggagattgagaaatgcaagagtgacattaagaagatgagggaggagctggcggccagaagcagcaggaccaactgcccctgtaagtacagttttttggataaccacaagaagttgactcctcgacgcgatgttcccacttaccccaagtacctgctctctccagagaccatcgaggccctgcggaagccgacctttgacgtctggctttgggagcccaatgagatgctgagctgcctggagcacatgtaccacgacctcgggctggtcagggacttcagcatcaaccctgtcaccctcaggaggtggctgttctgcgtccacgacaactacagaaacaaccccttccacaacttccggcactgcttctgcgtggcccagatgatgtacagcatggtctggctctgcagtctccaggagaagttctcacaaacggatatcctgatcctaatgacagcggccatctgccacgatctggaccatcccggctacaacaacacgtaccagatcaatgcccgcacagagctggcggtccgctacaatgacatctcaccgctggagaaccaccactgcgccgtggccttccagatcctcgccgagcctgagtgcaacatcttctccaacatcccacctgatgggttcaagcagatccgacagggaatgatcacattaatcttggccactgacatggcaagacatgcagaaattatggattctttcaaagagaaaatggagaattttgactacagcaacgaggagcacatgaccctgctgaagatgattttgataaaatgctgtgatatctctaacgaggtccgtccaatggaagtcgcagagccttgggtggactgtttattagaggaatattttatgcagagcgaccgtgagaagtcagaaggccttcctgtggcaccgttcatggaccgagacaaagtgaccaaggccacagcccagattgggttcatcaagtttgtcctgatcccaatgtttgaaacagtgaccaagctcttccccatggttgaggagatcatgctgcagccactttgggaatcccgagatcgctacgaggagctgaagcggatagatgacgccatgaaagagttacagaagaagactgacagcttgacgtctggggccaccgagaagtccagagagagaagcagagatgtgaaaaacagtgaaggagactgtgcctgaggaaagcggggggcgtggctgcagttctggacgggctggccgagctgcgcgggatccttgtgcagggaagagctgccctgggcacctggcaccacaagaccatgttttctaagaaccattttgttcactgatacaaaaaaaaaaaaaggaattcatgatgctgtacagaattttatttttaaactgtcttttaaataatatattcttatacggaaatgggtactgtacttcttctttggtagagttgtgtatgctgcttccggtaagttctctcatggagacgaaggacactgtgcttttcccccaga

SEQ ID NO: 10312 - protein, 533 aa, Homo sapiens; identical to SEQ ID NO: 10310

SEQ ID NO: 10313 - DNA, 1903 bp, Homo sapiens
cgcctcccgcggcggctggcgtcgggaaagtacagtaaaaagtccgagtgcagccgccgggcgcaggatgggatccggctcctccagctaccggcccaaggccatctacctggacatcgatggacgcattcagaaggtaatcttcagcaagtactgcaactccagcgacatcatggacctgttctgcatcgccaccggcctgcctcggaacacgaccatctccctgctgaccaccgacgacgccatggtctccatcgaccccaccatgcccgcgaattcagaacggaatgagctcattctctatacatcactccgtaacttgttgtttttacctagtaaggagtcatgggcgtcccaccagcactccgtacaaagtgagacctgtggccatcaagcaactctccgagcattcaaaatcaatgaactgaaagctgaagttgcaaatcacttggctgtcctagagaaacgcgtggaattggaaggactaaaagtggtggagattgagaaatgcaagagtgacattaagaagatgagggaggagctggcggccagaagcagcaggaccaactgcccctgtaagtacagttttttggataaccacaagaagttgactcctcgacgcgatgttcccacttaccccaagtacctgctctctccagagaccatcgaggccctgcggaagccgacctttgacgtctggctttgggagcccaatgagatgctgagctgcctggagcacatgtaccacgacctcgggctggtcagggacttcagcatcaaccctgtcaccctcaggaggtggctgttctgcgtccacgacaactacagaaacaaccccttccacaacttccggcactgcttctgcgtggcccagatgatgtacagcatggtctggctctgcagtctccaggagaagttctcacaaacggatatcctgatcctaatgacagcggccatctgccacgatctggaccatcccggctacaacaacacgtaccagatcaatgcccgcacagagctggcggtccgctacaatgacatctcaccgctggagaaccaccactgcgccgtggccttccagatcctcgccgagcctgagtgcaacatcttctccaacatcccacctgatgggttcaagcagatccgacagggaatgatcacattaatcttggccactgacatggcaagacatgcagaaattatggattctttcaaagagaaaatggagaattttgactacagcaacgaggagcacatgaccctgctgaagatgattttgataaaatgctgtgatatctctaacgaggtccgtccaatggaagtcgcagagccttgggtggactgtttattagaggaatattttatgcagagcgaccgtgagaagtcagaaggccttcctgtggcaccgttcatggaccgagacaaagtgaccaaggccacagcccagattgggttcatcaagtttgtcctgatcccaatgtttgaaacagtgaccaagctcttccccatggttgaggagatcatgctgcagccactttgggaatcccgagatcgctacgaggagctgaagcggatagatgacgccatgaaagagttacagaagaagactgacagcttgacgtctggggccaccgagaagtccagagagagaagcagagatgtgaaaaacagtgaaggagactgtgcctgaggaaagcggggggcgtggctgcagttctggacgggctggccgagctgcgcgggatccttgtgcagggaagagctgccctgggcacctggcaccacaagaccatgttttctaagaaccattttgttcactgatacaaaaaaaaaaaaaggaattcatgatgctgtacagaattttatttttaaactgtcttttaaataatatattcttatacgg

SEQ ID NO: 10314 - protein, 540 aa, Homo sapiens
MGSGSSSYRPKAIYLDIDGRIQKVIFSKYCNSSDIMDLFCIATGLPRNTTISLLTTDDAMVSIDPTMPANSERNELILYTSLRNLLFLPSKESWASHQHSVQSETCGHQATLRAFKINELKAEVANHLAVLEKRVELEGLKVVEIEKCKSDIKKMREELAARSSRTNCPCKYSFLDNHKKLTPRRDVPTYPKYLLSPETIEALRKPTFDVWLWEPNEMLSCLEHMYHDLGLVRDFSINPVTLRRWLFCVHDNYRNNPFHNFRHCFCVAQMMYSMVWLCSLQEKFSQTDILILMTAAICHDLDHPGYNNTYQINARTELAVRYNDISPLENHHCAVAFQILAEPECNIFSNIPPDGFKQIRQGMITLILATDMARHAEIMDSFKEKMENFDYSNEEHMTLLKMILIKCCDISNEVRPMEVAEPWVDCLLEEYFMQSDREKSEGLPVAPFMDRDKVTKATAQIGFIKFVLIPMFETVTKLFPMVEEIMLQPLWESRDRYEELKRIDDAMKELQKKTDSLTSGATEKSRERSRDVKNSEGDCA

SEQ ID NO: 10315 - DNA, 1958 bp, Homo sapiens
cgcctcccgcggcggctggcgtcgggaaagtacagtaaaaagtccgagtgcagccgccgggcgcaggatgggatccggctcctccagctaccggcccaaggccatctacctggacatcgatggacgcattcagaaggtaatcttcagcaagtactgcaactccagcgacatcatggacctgttctgcatcgccaccggcctgcctcggaacacgaccatctccctgctgaccaccgacgacgccatggtctccatcgaccccaccatgcccgcgaattcagaacggaatgagctcattctctatacatcactccgtaacttgttgtttttacctagtaaggagtcatgggcgtcccaccagcactccgtacaaagtgagacctgtggccatcaagcaactctccgagagagaagaattaatccagagcgtgctggcgcaggttgcagagcagttctcaagagcattcaaaatcaatgaactgaaagctgaagttgcaaatcacttggctgtcctagagaaacgcgtggaattggaaggactaaaagtggtggagattgagaaatgcaagagtgacattaagaagatgagggaggagctggcggccagaagcagcaggaccaactgcccctgtaagtacagttttttggataaccacaagaagttgactcctcgacgcgatgttcccacttaccccaagtacctgctctctccagagaccatcgaggccctgcggaagccgacctttgacgtctggctttgggagcccaatgagatgctgagctgcctggagcacatgtaccacgacctcgggctggtcagggacttcagcatcaaccctgtcaccctcaggaggtggctgttctgcgtccacgacaactacagaaacaaccccttccacaacttccggcactgcttctgcgtggcccagatgatgtacagcatggtctggctctgcagtctccaggagaagttctcacaaacggatatcctgatcctaatgacagcggccatctgccacgatctggaccatcccggctacaacaacacgtaccagatcaatgcccgcacagagctggcggtccgctacaatgacatctcaccgctggagaaccaccactgcgccgtggccttccagatcctcgccgagcctgagtgcaacatcttctccaacatcccacctgatgggttcaagcagatccgacagggaatgatcacattaatcttggccactgacatggcaagacatgcagaaattatggattctttcaaagagaaaatggagaattttgactacagcaacgaggagcacatgaccctgctgaagatgattttgataaaatgctgtgatatctctaacgaggtccgtccaatggaagtcgcagagccttgggtggactgtttattagaggaatattttatgcagagcgaccgtgagaagtcagaaggccttcctgtggcaccgttcatggaccgagacaaagtgaccaaggccacagcccagattgggttcatcaagtttgtcctgatcccaatgtttgaaacagtgaccaagctcttccccatggttgaggagatcatgctgcagccactttgggaatcccgagatcgctacgaggagctgaagcggatagatgacgccatgaaagagttacagaagaagactgacagcttgacgtctggggccaccgagaagtccagagagagaagcagagatgtgaaaaacagtgaaggagactgtgcctgaggaaagcggggggcgtggctgcagttctggacgggctggccgagctgcgcgggatccttgtgcagggaagagctgccctgggcacctggcaccacaagaccatgttttctaagaaccattttgttcactgatacaaaaaaaaaaaaaggaattcatgatgctgtacagaattttatttttaaactgtcttttaaataatatattcttatacgg

SEQ ID NO: 10316 - protein, 485 aa, Homo sapiens
MSSFSIHHSVTCCFYLVRSHGRPTSTPYKVRPVAIKQLSEREELIQSVLAQVAEQFSRAFKINELKAEVANHLAVLEKRVELEGLKVVEIEKCKSDIKKMREELAARSSRTNCPCKYSFLDNHKKLTPRRDVPTYPKYLLSPETIEALRKPTFDVWLWEPNEMLSCLEHMYHDLGLVRDFSINPVTLRRWLFCVHDNYRNNPFHNFRHCFCVAQMMYSMVWLCSLQEKFSQTDILILMTAAICHDLDHPGYNNTYQINARTELAVRYNDISPLENHHCAVAFQILAEPECNIFSNIPPDGFKQIRQGMITLILATDMARHAEIMDSFKEKMENFDYSNEEHMTLLKMILIKCCDISNEVRPMEVAEPWVDCLLEEYFMQSDREKSEGLPVAPFMDRDKVTKATAQIGFIKFVLIPMFETVTKLFPMVEEIMLQPLWESRDRYEELKRIDDAMKELQKKTDSLTSGATEKSRERSRDVKNSEGDCA

SEQ ID NO: 10317 - DNA, 1998 bp, Homo sapiens
cgcctcccgcggcggctggcgtcgggaaagtacagtaaaaagtccgagtgcagccgccgggcgcaggatgggatccggctcctccagctaccggcccaaggccatctacctggacatcgatggacgcattcagaaggtaatcttcagcaagtactgcaactccagcgacatcatggacctgttctgcatcgccaccggcctgcctcggaacacgaccatctccctgctgaccaccgacgacgccatggtctccatcgaccccaccatgcccgcgaattcagaacggaatgagctcattctctatacatcactccgtaacttgttgtttttacctagtaaggagtcatgggcgtcccaccagcactccgtacaaagtgagacctgtggccatcaagcaactctccgagcattcaaaatcaatgaactgaaagctgaagttgcaaatcacttggctgtcctagagaaacgcgtggaattggaaggactaaaagtggtggagattgagaaatgcaagagtgacattaagaagatgagggaggagctggcggccagaagcagcaggaccaactgcccctgtaagtacagttttttggataaccacaagaagttgactcctcgacgcgatgttcccacttaccccaagtacctgctctctccagagaccatcgaggccctgcggaagccgacctttgacgtctggctttgggagcccaatgagatgctgagctgcctggagcacatgtaccacgacctcgggctggtcagggacttcagcatcaaccctgtcaccctcaggaggtggctgttctgcgtccacgacaactacagaaacaaccccttccacaacttccggcactgcttctgcgtggcccagatgatgtacagcatggtctggctctgcagtctccaggagaagttctcacaaacggatatcctgatcctaatgacagcggccatctgccacgatctggaccatcccggctacaacaacacgtaccagatcaatgcccgcacagagctggcggtccgctacaatgacatctcaccgctggagaaccaccactgcgccgtggccttccagatcctcgccgagcctgagtgcaacatcttctccaacatcccacctgatgggttcaagcagatccgacagggaatgatcacattaatcttggccactgacatggcaagacatgcagaaattatggattctttcaaagagaaaatggagaattttgactacagcaacgaggagcacatgaccctgctgaagatgattttgataaaatgctgtgatatctctaacgaggtccgtccaatggaagtcgcagagccttgggtggactgtttattagaggaatattttatgcagagcgaccgtgagaagtcagaaggccttcctgtggcaccgttcatggaccgagacaaagtgaccaaggccacagcccagattgggttcatcaagtttgtcctgatcccaatgtttgaaacagtgaccaagctcttccccatggttgaggagatcatgctgcagccactttgggaatcccgagatcgctacgaggagctgaagcggatagatgacgccatgaaagagttacagaagaagactgacagcttgacgtctggggccaccgagaagtccagagagagaagcagagatgtgaaaaacagtgaaggagactgtgcctgaggaaagcggggggcgtggctgcagttctggacgggctggccgagctgcgcgggatccttgtgcagggaagagctgccctgggcacctggcaccacaagaccatgttttctaagaaccattttgttcactgatacaaaaaaaaaaaaaggaattcatgatgctgtacagaattttatttttaaactgtcttttaaataatatattcttatacggaaatgggtactgtacttcttctttggtagagttgtgtatgctgcttccggtaagttctctcatggagacgaaggacactgtgcttttcccccaga

SEQ ID NO: 10318 - protein, 540 aa, Homo sapiens; identical to SEQ ID NO: 10314

SEQ ID NO: 10319 - DNA, 1752 bp, Homo sapiens
tcccgcggcggctggcgtcgggaaagtacagtaaaaagtccgagtgcagccgccgggcgcaggatgggatccggctcctccagctaccggcccaaggccatctacctggacatcgatggacgcattcagaaggaacacgaccatctccctgctgaccaccgacgacgccatggtctccatcgaccccaccatgcccgcgaattcagaacgcactccgtacaaagtgagacctgtggccatcaagcaactctccgagcattcaaaatcaatgaactgaaagctgaagttgcaaatcacttggctgtcctagagaaacgcgtggaattggaaggactaaaagtggtggagattgagaaatgcaagagtgacattaagaagatgagggaggagctggcggccagaagcagcaggaccaactgcccctgtaagtacagttttttggataaccacaagaagttgactcctcgacgcgatgttcccacttaccccaagtacctgctctctccagagaccatcgaggccctgcggaagccgacctttgacgtctggctttgggagcccaatgagatgctgagctgcctggagcacatgtaccacgacctcgggctggtcagggacttcagcatcaaccctgtcaccctcaggaggtggctgttctgcgtccacgacaactacagaaacaaccccttccacaacttccggcactgcttctgcgtggcccagatgatgtacagcatggtctggctctgcagtctccaggagaagttctcacaaacggatatcctgatcctaatgacagcggccatctgccacgatctggaccatcccggctacaacaacacgtaccagatcaatgcccgcacagagctggcggtccgctacaatgacatctcaccgctggagaaccaccactgcgccgtggccttccagatcctcgccgagcctgagtgcaacatcttctccaacatcccacctgatgggttcaagcagatccgacagggaatgatcacattaatcttggccactgacatggcaagacatgcagaaattatggattctttcaaagagaaaatggagaattttgactacagcaacgaggagcacatgaccctgctgaagatgattttgataaaatgctgtgatatctctaacgaggtccgtccaatggaagtcgcagagccttgggtggactgtttattagaggaatattttatgcagagcgaccgtgagaagtcagaaggccttcctgtggcaccgttcatggaccgagacaaagtgaccaaggccacagcccagattgggttcatcaagtttgtcctgatcccaatgtttgaaacagtgaccaagctcttccccatggttgaggagatcatgctgcagccactttgggaatcccgagatcgctacgaggagctgaagcggatagatgacgccatgaaagagttacagaagaagactgacagcttgacgtctggggccaccgagaagtccagagagagaagcagagatgtgaaaaacagtgaaggagactgtgcctgaggaaagcggggggcgtggctgcagttctggacgggctggccgagctgcgcgggatccttgtgcagggaagagctgccctgggcacctggcaccacaagaccatgttttctaagaaccattttgttcactgatacaaaaaaaaaaaaaggaattcatgatgctgtacagaattttatttttaaactgtcttttaaataatatattcttatacgg

SEQ ID NO: 10320 - protein, 491 aa, Homo sapiens
MGSGSSSYRPKAIYLDIDGRIQKEHDHLPADHRRRHGLHRPHHAREFRTHSVQSETCGHQATLRAFKINELKAEVANHLAVLEKRVELEGLKVVEIEKCKSDIKKMREELAARSSRTNCPCKYSFLDNHKKLTPRRDVPTYPKYLLSPETIEALRKPTFDVWLWEPNEMLSCLEHMYHDLGLVRDFSINPVTLRRWLFCVHDNYRNNPFHNFRHCFCVAQMMYSMVWLCSLQEKFSQTDILILMTAAICHDLDHPGYNNTYQINARTELAVRYNDISPLENHHCAVAFQILAEPECNIFSNIPPDGFKQIRQGMITLILATDMARHAEIMDSFKEKMENFDYSNEEHMTLLKMILIKCCDISNEVRPMEVAEPWVDCLLEEYFMQSDREKSEGLPVAPFMDRDKVTKATAQIGFIKFVLIPMFETVTKLFPMVEEIMLQPLWESRDRYEELKRIDDAMKELQKKTDSLTSGATEKSRERSRDVKNSEGDCA

SEQ ID NO: 10321 - DNA, 1808 bp, Homo sapiens
tcccgcggcggctggcgtcgggaaagtacagtaaaaagtccgagtgcagccgccgggcgcaggatgggatccggctcctccagctaccggcccaaggccatctacctggacatcgatggacgcattcagaagcactccgtacaaagtgagacctgtggccatcaagcaactctccgcaaaagaatgcagattttgcattatctaaagaggcggttccgtgagcccactgtgctgagtcacatatattccatcggtagagagaagaattaatccagagcgtgctggcgcaggttgcagagcagttctcaagagcattcaaaatcaatgaactgaaagctgaagttgcaaatcacttggctgtcctagagaaacgcgtggaattggaaggactaaaagtggtggagattgagaaatgcaagagtgacattaagaagatgagggaggagctggcggccagaagcagcaggaccaactgcccctgtaagtacagttttttggataaccacaagaagttgactcctcgacgcgatgttcccacttaccccaagtacctgctctctccagagaccatcgaggccctgcggaagccgacctttgacgtctggctttgggagcccaatgagatgctgagctgcctggagcacatgtaccacgacctcgggctggtcagggacttcagcatcaaccctgtcaccctcaggaggtggctgttctgcgtccacgacaactacagaaacaaccccttccacaacttccggcactgcttctgcgtggcccagatgatgtacagcatggtctggctctgcagtctccaggagaagttctcacaaacggatatcctgatcctaatgacagcggccatctgccacgatctggaccatcccggctacaacaacacgtaccagatcaatgcccgcacagagctggcggtccgctacaatgacatctcaccgctggagaaccaccactgcgccgtggccttccagatcctcgccgagcctgagtgcaacatcttctccaacatcccacctgatgggttcaagcagatccgacagggaatgatcacattaatcttggccactgacatggcaagacatgcagaaattatggattctttcaaagagaaaatggagaattttgactacagcaacgaggagcacatgaccctgctgaagatgattttgataaaatgctgtgatatctctaacgaggtccgtccaatggaagtcgcagagccttgggtggactgtttattagaggaatattttatgcagagcgaccgtgagaagtcagaaggccttcctgtggcaccgttcatggaccgagacaaagtgaccaaggccacagcccagattgggttcatcaagtttgtcctgatcccaatgtttgaaacagtgaccaagctcttccccatggttgaggagatcatgctgcagccactttgggaatcccgagatcgctacgaggagctgaagcggatagatgacgccatgaaagagttacagaagaagactgacagcttgacgtctggggccaccgagaagtccagagagagaagcagagatgtgaaaaacagtgaaggagactgtgcctgaggaaagcggggggcgtggctgcagttctggacgggctggccgagctgcgcgggatccttgtgcagggaagagctgccctgggcacctggcaccacaagaccatgttttctaagaaccattttgttcactgatacaaaaaaaaaaaaaggaattcatgatgctgtacagaattttatttttaaactgtcttttaaataatatattcttatacgg

SEQ ID NO: 10322 - protein, 386 aa, Homo sapiens
MREELAARSSRTNCPCKYSFLDNHKKLTPRRDVPTYPKYLLSPETIEALRKPTFDVWLWEPNEMLSCLEHMYHDLGLVRDFSINPVTLRRWLFCVHDNYRNNPFHNFRHCFCVAQMMYSMVWLCSLQEKFSQTDILILMTAAICHDLDHPGYNNTYQINARTELAVRYNDISPLENHHCAVAFQILAEPECNIFSNIPPDGFKQIRQGMITLILATDMARHAEIMDSFKEKMENFDYSNEEHMTLLKMILIKCCDISNEVRPMEVAEPWVDCLLEEYFMQSDREKSEGLPVAPFMDRDKVTKATAQIGFIKFVLIPMFETVTKLFPMVEEIMLQPLWESRDRYEELKRIDDAMKELQKKTDSLTSGATEKSRERSRDVKNSEGDCA

SEQ ID NO: 10323 - DNA, 1630 bp, Homo sapiens
tcccgcggcggctggcgtcgggaaagtacagtaaaaagtccgagtgcagccgccgggcgcaggatgggatccggctcctccagctaccggcccaaggccatctacctggacatcgatggacgcattcagaagagcattcaaaatcaatgaactgaaagctgaagttgcaaatcacttggctgtcctagagaaacgcgtggaattggaaggactaaaagtggtggagattgagaaatgcaagagtgacattaagaagatgagggaggagctggcggccagaagcagcaggaccaactgcccctgtaagtacagttttttggataaccacaagaagttgactcctcgacgcgatgttcccacttaccccaagtacctgctctctccagagaccatcgaggccctgcggaagccgacctttgacgtctggctttgggagcccaatgagatgctgagctgcctggagcacatgtaccacgacctcgggctggtcagggacttcagcatcaaccctgtcaccctcaggaggtggctgttctgcgtccacgacaactacagaaacaaccccttccacaacttccggcactgcttctgcgtggcccagatgatgtacagcatggtctggctctgcagtctccaggagaagttctcacaaacggatatcctgatcctaatgacagcggccatctgccacgatctggaccatcccggctacaacaacacgtaccagatcaatgcccgcacagagctggcggtccgctacaatgacatctcaccgctggagaaccaccactgcgccgtggccttccagatcctcgccgagcctgagtgcaacatcttctccaacatcccacctgatgggttcaagcagatccgacagggaatgatcacattaatcttggccactgacatggcaagacatgcagaaattatggattctttcaaagagaaaatggagaattttgactacagcaacgaggagcacatgaccctgctgaagatgattttgataaaatgctgtgatatctctaacgaggtccgtccaatggaagtcgcagagccttgggtggactgtttattagaggaatattttatgcagagcgaccgtgagaagtcagaaggccttcctgtggcaccgttcatggaccgagacaaagtgaccaaggccacagcccagattgggttcatcaagtttgtcctgatcccaatgtttgaaacagtgaccaagctcttccccatggttgaggagatcatgctgcagccactttgggaatcccgagatcgctacgaggagctgaagcggatagatgacgccatgaaagagttacagaagaagactgacagcttgacgtctggggccaccgagaagtccagagagagaagcagagatgtgaaaaacagtgaaggagactgtgcctgaggaaagcggggggcgtggctgcagttctggacgggctggccgagctgcgcgggatccttgtgcagggaagagctgccctgggcacctggcaccacaagaccatgttttctaagaaccattttgttcactgatacaaaaaaaaaaaaaggaattcatgatgctgtacagaattttatttttaaactgtcttttaaataatatattcttatacgg

SEQ ID NO: 10324 - protein, 433 aa, Homo sapiens
MDAFRRAFKINELKAEVANHLAVLEKRVELEGLKVVEIEKCKSDIKKMREELAARSSRTNCPCKYSFLDNHKKLTPRRDVPTYPKYLLSPETIEALRKPTFDVWLWEPNEMLSCLEHMYHDLGLVRDFSINPVTLRRWLFCVHDNYRNNPFHNFRHCFCVAQMMYSMVWLCSLQEKFSQTDILILMTAAICHDLDHPGYNNTYQINARTELAVRYNDISPLENHHCAVAFQILAEPECNIFSNIPPDGFKQIRQGMITLILATDMARHAEIMDSFKEKMENFDYSNEEHMTLLKMILIKCCDISNEVRPMEVAEPWVDCLLEEYFMQSDREKSEGLPVAPFMDRDKVTKATAQIGFIKFVLIPMFETVTKLFPMVEEIMLQPLWESRDRYEELKRIDDAMKELQKKTDSLTSGATEKSRERSRDVKNSEGDCA

SEQ ID NO: 10325 - DNA, 1745 bp, Homo sapiens
tcccgcggcggctggcgtcgggaaagtacagtaaaaagtccgagtgcagccgccgggcgcaggatgggatccggctcctccagctaccggcccaaggccatctacctggacatcgatggacgcattcagaaggtaatcttcagcaagtactgcaactccagcgacatcatggacctgttctgcatcgccaccggcctgcctcgcactccgtacaaagtgagacctgtggccatcaagcaactctccgagcattcaaaatcaatgaactgaaagctgaagttgcaaatcacttggctgtcctagagaaacgcgtggaattggaaggactaaaagtggtggagattgagaaatgcaagagtgacattaagaagatgagggaggagctggcggccagaagcagcaggaccaactgcccctgtaagtacagttttttggataaccacaagaagttgactcctcgacgcgatgttcccacttaccccaagtacctgctctctccagagaccatcgaggccctgcggaagccgacctttgacgtctggctttgggagcccaatgagatgctgagctgcctggagcacatgtaccacgacctcgggctggtcagggacttcagcatcaaccctgtcaccctcaggaggtggctgttctgcgtccacgacaactacagaaacaaccccttccacaacttccggcactgcttctgcgtggcccagatgatgtacagcatggtctggctctgcagtctccaggagaagttctcacaaacggatatcctgatcctaatgacagcggccatctgccacgatctggaccatcccggctacaacaacacgtaccagatcaatgcccgcacagagctggcggtccgctacaatgacatctcaccgctggagaaccaccactgcgccgtggccttccagatcctcgccgagcctgagtgcaacatcttctccaacatcccacctgatgggttcaagcagatccgacagggaatgatcacattaatcttggccactgacatggcaagacatgcagaaattatggattctttcaaagagaaaatggagaattttgactacagcaacgaggagcacatgaccctgctgaagatgattttgataaaatgctgtgatatctctaacgaggtccgtccaatggaagtcgcagagccttgggtggactgtttattagaggaatattttatgcagagcgaccgtgagaagtcagaaggccttcctgtggcaccgttcatggaccgagacaaagtgaccaaggccacagcccagattgggttcatcaagtttgtcctgatcccaatgtttgaaacagtgaccaagctcttccccatggttgaggagatcatgctgcagccactttgggaatcccgagatcgctacgaggagctgaagcggatagatgacgccatgaaagagttacagaagaagactgacagcttgacgtctggggccaccgagaagtccagagagagaagcagagatgtgaaaaacagtgaaggagactgtgcctgaggaaagcggggggcgtggctgcagttctggacgggctggccgagctgcgcgggatccttgtgcagggaagagctgccctgggcacctggcaccacaagaccatgttttctaagaaccattttgttcactgatacaaaaaaaaaaaaaggaattcatgatgctgtacagaattttatttttaaactgtcttttaaataatatattcttatacgg

SEQ ID NO: 10326 - protein, 386 aa, Homo sapiens; identical to SEQ ID NO: 10322

SEQ ID NO: 10327 - DNA, 1729 bp, Homo sapiens
tcccgcggcggctggcgtcgggaaagtacagtaaaaagtccgagtgcagccgccgggcgcaggatgggatccggctcctccagctaccggcccaaggccatctacctggacatcgatggacgcattcagaagcactccgtacaaagtgagacctgtggccatcaagcaactctccgagagagaagaattaatccagagcgtgctggcgcaggttgcagagcagttctcaagagcattcaaaatcaatgaactgaaagctgaagttgcaaatcacttggctgtcctagagaaacgcgtggaattggaaggactaaaagtggtggagattgagaaatgcaagagtgacattaagaagatgagggaggagctggcggccagaagcagcaggaccaactgcccctgtaagtacagttttttggataaccacaagaagttgactcctcgacgcgatgttcccacttaccccaagtacctgctctctccagagaccatcgaggccctgcggaagccgacctttgacgtctggctttgggagcccaatgagatgctgagctgcctggagcacatgtaccacgacctcgggctggtcagggacttcagcatcaaccctgtcaccctcaggaggtggctgttctgcgtccacgacaactacagaaacaaccccttccacaacttccggcactgcttctgcgtggcccagatgatgtacagcatggtctggctctgcagtctccaggagaagttctcacaaacggatatcctgatcctaatgacagcggccatctgccacgatctggaccatcccggctacaacaacacgtaccagatcaatgcccgcacagagctggcggtccgctacaatgacatctcaccgctggagaaccaccactgcgccgtggccttccagatcctcgccgagcctgagtgcaacatcttctccaacatcccacctgatgggttcaagcagatccgacagggaatgatcacattaatcttggccactgacatggcaagacatgcagaaattatggattctttcaaagagaaaatggagaattttgactacagcaacgaggagcacatgaccctgctgaagatgattttgataaaatgctgtgatatctctaacgaggtccgtccaatggaagtcgcagagccttgggtggactgtttattagaggaatattttatgcagagcgaccgtgagaagtcagaaggccttcctgtggcaccgttcatggaccgagacaaagtgaccaaggccacagcccagattgggttcatcaagtttgtcctgatcccaatgtttgaaacagtgaccaagctcttccccatggttgaggagatcatgctgcagccactttgggaatcccgagatcgctacgaggagctgaagcggatagatgacgccatgaaagagttacagaagaagactgacagcttgacgtctggggccaccgagaagtccagagagagaagcagagatgtgaaaaacagtgaaggagactgtgcctgaggaaagcggggggcgtggctgcagttctggacgggctggccgagctgcgcgggatccttgtgcagggaagagctgccctgggcacctggcaccacaagaccatgttttctaagaaccattttgttcactgatacaaaaaaaaaaaaaggaattcatgatgctgtacagaattttatttttaaactgtcttttaaataatatattcttatacgg

SEQ ID NO: 10328 - protein, 466 aa, Homo sapiens
MDAFRSTPYKVRPVAIKQLSEREELIQSVLAQVAEQFSRAFKINELKAEVANHLAVLEKRVELEGLKVVEIEKCKSDIKKMREELAARSSRTNCPCKYSFLDNHKKLTPRRDVPTYPKYLLSPETIEALRKPTFDVWLWEPNEMLSCLEHMYHDLGLVRDFSINPVTLRRWLFCVHDNYRNNPFHNFRHCFCVAQMMYSMVWLCSLQEKFSQTDILILMTAAICHDLDHPGYNNTYQINARTELAVRYNDISPLENHHCAVAFQILAEPECNIFSNIPPDGFKQIRQGMITLILATDMARHAEIMDSFKEKMENFDYSNEEHMTLLKMILIKCCDISNEVRPMEVAEPWVDCLLEEYFMQSDREKSEGLPVAPFMDRDKVTKATAQIGFIKFVLIPMFETVTKLFPMVEEIMLQPLWESRDRYEELKRIDDAMKELQKKTDSLTSGATEKSRERSRDVKNSEGDCA

SEQ ID NO: 10329 - DNA, 1865 bp, Homo sapiens
tcccgcggcggctggcgtcgggaaagtacagtaaaaagtccgagtgcagccgccgggcgcaggatgggatccggctcctccagctaccggcccaaggccatctacctggacatcgatggacgcattcagaagctggtgtcgaggacaagagaaccacaagccgtggccagtctgctgagagaccactgagggacagacgggttgtgggcctggagcagccccggagggaaggagcatttgaaagtggacaggtagagcccaggcccagagagccccagggctgctaccaggaaggccagcgcatccctccagagagagaagaattaatccagagcgtgctggcgcaggttgcagagcagttctcaagagcattcaaaatcaatgaactgaaagctgaagttgcaaatcacttggctgtcctagagaaacgcgtggaattggaaggactaaaagtggtggagattgagaaatgcaagagtgacattaagaagatgagggaggagctggcggccagaagcagcaggaccaactgcccctgtaagtacagttttttggataaccacaagaagttgactcctcgacgcgatgttcccacttaccccaagtacctgctctctccagagaccatcgaggccctgcggaagccgacctttgacgtctggctttgggagcccaatgagatgctgagctgcctggagcacatgtaccacgacctcgggctggtcagggacttcagcatcaaccctgtcaccctcaggaggtggctgttctgcgtccacgacaactacagaaacaaccccttccacaacttccggcactgcttctgcgtggcccagatgatgtacagcatggtctggctctgcagtctccaggagaagttctcacaaacggatatcctgatcctaatgacagcggccatctgccacgatctggaccatcccggctacaacaacacgtaccagatcaatgcccgcacagagctggcggtccgctacaatgacatctcaccgctggagaaccaccactgcgccgtggccttccagatcctcgccgagcctgagtgcaacatcttctccaacatcccacctgatgggttcaagcagatccgacagggaatgatcacattaatcttggccactgacatggcaagacatgcagaaattatggattctttcaaagagaaaatggagaattttgactacagcaacgaggagcacatgaccctgctgaagatgattttgataaaatgctgtgatatctctaacgaggtccgtccaatggaagtcgcagagccttgggtggactgtttattagaggaatattttatgcagagcgaccgtgagaagtcagaaggccttcctgtggcaccgttcatggaccgagacaaagtgaccaaggccacagcccagattgggttcatcaagtttgtcctgatcccaatgtttgaaacagtgaccaagctcttccccatggttgaggagatcatgctgcagccactttgggaatcccgagatcgctacgaggagctgaagcggatagatgacgccatgaaagagttacagaagaagactgacagcttgacgtctggggccaccgagaagtccagagagagaagcagagatgtgaaaaacagtgaaggagactgtgcctgaggaaagcggggggcgtggctgcagttctggacgggctggccgagctgcgcgggatccttgtgcagggaagagctgccctgggcacctggcaccacaagaccatgttttctaagaaccattttgttcactgatacaaaaaaaaaaaaaggaattcatgatgctgtacagaattttatttttaaactgtcttttaaataatatattcttatacgg

SEQ ID NO: 10330 - protein, 386 aa, Homo sapiens; identical to SEQ ID NO: 10322

SEQ ID NO: 10331 - DNA, 1674 bp, Homo sapiens
tcccgcggcggctggcgtcgggaaagtacagtaaaaagtccgagtgcagccgccgggcgcaggatgggatccggctcctccagctaccggcccaaggccatctacctggacatcgatggacgcattcagaagcactccgtacaaagtgagacctgtggccatcaagcaactctccgagcattcaaaatcaatgaactgaaagctgaagttgcaaatcacttggctgtcctagagaaacgcgtggaattggaaggactaaaagtggtggagattgagaaatgcaagagtgacattaagaagatgagggaggagctggcggccagaagcagcaggaccaactgcccctgtaagtacagttttttggataaccacaagaagttgactcctcgacgcgatgttcccacttaccccaagtacctgctctctccagagaccatcgaggccctgcggaagccgacctttgacgtctggctttgggagcccaatgagatgctgagctgcctggagcacatgtaccacgacctcgggctggtcagggacttcagcatcaaccctgtcaccctcaggaggtggctgttctgcgtccacgacaactacagaaacaaccccttccacaacttccggcactgcttctgcgtggcccagatgatgtacagcatggtctggctctgcagtctccaggagaagttctcacaaacggatatcctgatcctaatgacagcggccatctgccacgatctggaccatcccggctacaacaacacgtaccagatcaatgcccgcacagagctggcggtccgctacaatgacatctcaccgctggagaaccaccactgcgccgtggccttccagatcctcgccgagcctgagtgcaacatcttctccaacatcccacctgatgggttcaagcagatccgacagggaatgatcacattaatcttggccactgacatggcaagacatgcagaaattatggattctttcaaagagaaaatggagaattttgactacagcaacgaggagcacatgaccctgctgaagatgattttgataaaatgctgtgatatctctaacgaggtccgtccaatggaagtcgcagagccttgggtggactgtttattagaggaatattttatgcagagcgaccgtgagaagtcagaaggccttcctgtggcaccgttcatggaccgagacaaagtgaccaaggccacagcccagattgggttcatcaagtttgtcctgatcccaatgtttgaaacagtgaccaagctcttccccatggttgaggagatcatgctgcagccactttgggaatcccgagatcgctacgaggagctgaagcggatagatgacgccatgaaagagttacagaagaagactgacagcttgacgtctggggccaccgagaagtccagagagagaagcagagatgtgaaaaacagtgaaggagactgtgcctgaggaaagcggggggcgtggctgcagttctggacgggctggccgagctgcgcgggatccttgtgcagggaagagctgccctgggcacctggcaccacaagaccatgttttctaagaaccattttgttcactgatacaaaaaaaaaaaaaggaattcatgatgctgtacagaattttatttttaaactgtcttttaaataatatattcttatacgg

SEQ ID NO: 10332 - protein, 465 aa, Homo sapiens
MGSGSSSYRPKAIYLDIDGRIQKHSVQSETCGHQATLRAFKINELKAEVANHLAVLEKRVELEGLKVVEIEKCKSDIKKMREELAARSSRTNCPCKYSFLDNHKKLTPRRDVPTYPKYLLSPETIEALRKPTFDVWLWEPNEMLSCLEHMYHDLGLVRDFSINPVTLRRWLFCVHDNYRNNPFHNFRHCFCVAQMMYSMVWLCSLQEKFSQTDILILMTAAICHDLDHPGYNNTYQINARTELAVRYNDISPLENHHCAVAFQILAEPECNIFSNIPPDGFKQIRQGMITLILATDMARHAEIMDSFKEKMENFDYSNEEHMTLLKMILIKCCDISNEVRPMEVAEPWVDCLLEEYFMQSDREKSEGLPVAPFMDRDKVTKATAQIGFIKFVLIPMFETVTKLFPMVEEIMLQPLWESRDRYEELKRIDDAMKELQKKTDSLTSGATEKSRERSRDVKNSEGDCA

SEQ ID NO: 10333 - DNA, 1909 bp, Homo sapiens
tcccgcggcggctggcgtcgggaaagtacagtaaaaagtccgagtgcagccgccgggcgcaggatgggatccggctcctccagctaccggcccaaggccatctacctggacatcgatggacgcattcagaagcactccgtacaaagtgagacctgtggccatcaagcaactctccgctggtgtcgaggacaagagaaccacaagccgtggccagtctgctgagagaccactgagggacagacgggttgtgggcctggagcagccccggagggaaggagcatttgaaagtggacaggtagagcccaggcccagagagccccagggctgctaccaggaaggccagcgcatccctccagagagagaagaattaatccagagcgtgctggcgcaggttgcagagcagttctcaagagcattcaaaatcaatgaactgaaagctgaagttgcaaatcacttggctgtcctagagaaacgcgtggaattggaaggactaaaagtggtggagattgagaaatgcaagagtgacattaagaagatgagggaggagctggcggccagaagcagcaggaccaactgcccctgtaagtacagttttttggataaccacaagaagttgactcctcgacgcgatgttcccacttaccccaagtacctgctctctccagagaccatcgaggccctgcggaagccgacctttgacgtctggctttgggagcccaatgagatgctgagctgcctggagcacatgtaccacgacctcgggctggtcagggacttcagcatcaaccctgtcaccctcaggaggtggctgttctgcgtccacgacaactacagaaacaaccccttccacaacttccggcactgcttctgcgtggcccagatgatgtacagcatggtctggctctgcagtctccaggagaagttctcacaaacggatatcctgatcctaatgacagcggccatctgccacgatctggaccatcccggctacaacaacacgtaccagatcaatgcccgcacagagctggcggtccgctacaatgacatctcaccgctggagaaccaccactgcgccgtggccttccagatcctcgccgagcctgagtgcaacatcttctccaacatcccacctgatgggttcaagcagatccgacagggaatgatcacattaatcttggccactgacatggcaagacatgcagaaattatggattctttcaaagagaaaatggagaattttgactacagcaacgaggagcacatgaccctgctgaagatgattttgataaaatgctgtgatatctctaacgaggtccgtccaatggaagtcgcagagccttgggtggactgtttattagaggaatattttatgcagagcgaccgtgagaagtcagaaggccttcctgtggcaccgttcatggaccgagacaaagtgaccaaggccacagcccagattgggttcatcaagtttgtcctgatcccaatgtttgaaacagtgaccaagctcttccccatggttgaggagatcatgctgcagccactttgggaatcccgagatcgctacgaggagctgaagcggatagatgacgccatgaaagagttacagaagaagactgacagcttgacgtctggggccaccgagaagtccagagagagaagcagagatgtgaaaaacagtgaaggagactgtgcctgaggaaagcggggggcgtggctgcagttctggacgggctggccgagctgcgcgggatccttgtgcagggaagagctgccctgggcacctggcaccacaagaccatgttttctaagaaccattttgttcactgatacaaaaaaaaaaaaaggaattcatgatgctgtacagaattttatttttaaactgtcttttaaataatatattcttatacgg

SEQ ID NO: 10334 - protein, 526 aa, Homo sapiens
MDAFRSTPYKVRPVAIKQLSAGVEDKRTTSRGQSAERPLRDRRVVGLEQPRREGAFESGQVEPRPREPQGCYQEGQRIPPEREELIQSVLAQVAEQFSRAFKINELKAEVANHLAVLEKRVELEGLKVVEIEKCKSDIKKMREELAARSSRTNCPCKYSFLDNHKKLTPRRDVPTYPKYLLSPETIEALRKPTFDVWLWEPNEMLSCLEHMYHDLGLVRDFSINPVTLRRWLFCVHDNYRNNPFHNFRHCFCVAQMMYSMVWLCSLQEKFSQTDILILMTAAICHDLDHPGYNNTYQINARTELAVRYNDISPLENHHCAVAFQILAEPECNIFSNIPPDGFKQIRQGMITLILATDMARHAEIMDSFKEKMENFDYSNEEHMTLLKMILIKCCDISNEVRPMEVAEPWVDCLLEEYFMQSDREKSEGLPVAPFMDRDKVTKATAQIGFIKFVLIPMFETVTKLFPMVEEIMLQPLWESRDRYEELKRIDDAMKELQKKTDSLTSGATEKSRERSRDVKNSEGDCA

SEQ ID NO: 10335 - DNA, 2058 bp, Homo sapiens
tcccgcggcggctggcgtcgggaaagtacagtaaaaagtccgagtgcagccgccgggcgcaggatgggatccggctcctccagctaccggcccaaggccatctacctggacatcgatggacgcattcagaaggtaatcttcagcaagtactgcaactccagcgacatcatggacctgttctgcatcgccaccggcctgcctcggaacacgaccatctccctgctgaccaccgacgacgccatggtctccatcgaccccaccatgcccgcgaattcagaacgcactccgtacaaagtgagacctgtggccatcaagcaactctccgctggtgtcgaggacaagagaaccacaagccgtggccagtctgctgagagaccactgagggacagacgggttgtgggcctggagcagccccggagggaaggagcatttgaaagtggacaggtagagcccaggcccagagagccccagggctgctaccaggaaggccagcgcatccctccagagagagaagaattaatccagagcgtgctggcgcaggttgcagagcagttctcaagagcattcaaaatcaatgaactgaaagctgaagttgcaaatcacttggctgtcctagagaaacgcgtggaattggaaggactaaaagtggtggagattgagaaatgcaagagtgacattaagaagatgagggaggagctggcggccagaagcagcaggaccaactgcccctgtaagtacagttttttggataaccacaagaagttgactcctcgacgcgatgttcccacttaccccaagtacctgctctctccagagaccatcgaggccctgcggaagccgacctttgacgtctggctttgggagcccaatgagatgctgagctgcctggagcacatgtaccacgacctcgggctggtcagggacttcagcatcaaccctgtcaccctcaggaggtggctgttctgcgtccacgacaactacagaaacaaccccttccacaacttccggcactgcttctgcgtggcccagatgatgtacagcatggtctggctctgcagtctccaggagaagttctcacaaacggatatcctgatcctaatgacagcggccatctgccacgatctggaccatcccggctacaacaacacgtaccagatcaatgcccgcacagagctggcggtccgctacaatgacatctcaccgctggagaaccaccactgcgccgtggccttccagatcctcgccgagcctgagtgcaacatcttctccaacatcccacctgatgggttcaagcagatccgacagggaatgatcacattaatcttggccactgacatggcaagacatgcagaaattatggattctttcaaagagaaaatggagaattttgactacagcaacgaggagcacatgaccctgctgaagatgattttgataaaatgctgtgatatctctaacgaggtccgtccaatggaagtcgcagagccttgggtggactgtttattagaggaatattttatgcagagcgaccgtgagaagtcagaaggccttcctgtggcaccgttcatggaccgagacaaagtgaccaaggccacagcccagattgggttcatcaagtttgtcctgatcccaatgtttgaaacagtgaccaagctcttccccatggttgaggagatcatgctgcagccactttgggaatcccgagatcgctacgaggagctgaagcggatagatgacgccatgaaagagttacagaagaagactgacagcttgacgtctggggccaccgagaagtccagagagagaagcagagatgtgaaaaacagtgaaggagactgtgcctgaggaaagcggggggcgtggctgcagttctggacgggctggccgagctgcgcgggatccttgtgcagggaagagctgccctgggcacctggcaccacaagaccatgttttctaagaaccattttgttcactgatacaaaaaaaaaaaaaggaattcatgatgctgtacagaattttatttttaaactgtcttttaaataatatattcttatacgg

SEQ ID NO: 10336 - protein, 593 aa, Homo sapiens
MGSGSSSYRPKAIYLDIDGRIQKVIFSKYCNSSDIMDLFCIATGLPRNTTISLLTTDDAMVSIDPTMPANSERTPYKVRPVAIKQLSAGVEDKRTTSRGQSAERPLRDRRVVGLEQPRREGAFESGQVEPRPREPQGCYQEGQRIPPEREELIQSVLAQVAEQFSRAFKINELKAEVANHLAVLEKRVELEGLKVVEIEKCKSDIKKMREELAARSSRTNCPCKYSFLDNHKKLTPRRDVPTYPKYLLSPETIEALRKPTFDVWLWEPNEMLSCLEHMYHDLGLVRDFSINPVTLRRWLFCVHDNYRNNPFHNFRHCFCVAQMMYSMVWLCSLQEKFSQTDILILMTAAICHDLDHPGYNNTYQINARTELAVRYNDISPLENHHCAVAFQILAEPECNIFSNIPPDGFKQIRQGMITLILATDMARHAEIMDSFKEKMENFDYSNEEHMTLLKMILIKCCDISNEVRPMEVAEPWVDCLLEEYFMQSDREKSEGLPVAPFMDRDKVTKATAQIGFIKFVLIPMFETVTKLFPMVEEIMLQPLWESRDRYEELKRIDDAMKELQKKTDSLTSGATEKSRERSRDVKNSEGDCA

SEQ ID NO: 10337 - DNA, 1800 bp, Homo sapiens
tcccgcggcggctggcgtcgggaaagtacagtaaaaagtccgagtgcagccgccgggcgcaggatgggatccggctcctccagctaccggcccaaggccatctacctggacatcgatggacgcattcagaaggtaatcttcagcaagtactgcaactccagcgacatcatggacctgttctgcatcgccaccggcctgcctcgcactccgtacaaagtgagacctgtggccatcaagcaactctccgagagagaagaattaatccagagcgtgctggcgcaggttgcagagcagttctcaagagcattcaaaatcaatgaactgaaagctgaagttgcaaatcacttggctgtcctagagaaacgcgtggaattggaaggactaaaagtggtggagattgagaaatgcaagagtgacattaagaagatgagggaggagctggcggccagaagcagcaggaccaactgcccctgtaagtacagttttttggataaccacaagaagttgactcctcgacgcgatgttcccacttaccccaagtacctgctctctccagagaccatcgaggccctgcggaagccgacctttgacgtctggctttgggagcccaatgagatgctgagctgcctggagcacatgtaccacgacctcgggctggtcagggacttcagcatcaaccctgtcaccctcaggaggtggctgttctgcgtccacgacaactacagaaacaaccccttccacaacttccggcactgcttctgcgtggcccagatgatgtacagcatggtctggctctgcagtctccaggagaagttctcacaaacggatatcctgatcctaatgacagcggccatctgccacgatctggaccatcccggctacaacaacacgtaccagatcaatgcccgcacagagctggcggtccgctacaatgacatctcaccgctggagaaccaccactgcgccgtggccttccagatcctcgccgagcctgagtgcaacatcttctccaacatcccacctgatgggttcaagcagatccgacagggaatgatcacattaatcttggccactgacatggcaagacatgcagaaattatggattctttcaaagagaaaatggagaattttgactacagcaacgaggagcacatgaccctgctgaagatgattttgataaaatgctgtgatatctctaacgaggtccgtccaatggaagtcgcagagccttgggtggactgtttattagaggaatattttatgcagagcgaccgtgagaagtcagaaggccttcctgtggcaccgttcatggaccgagacaaagtgaccaaggccacagcccagattgggttcatcaagtttgtcctgatcccaatgtttgaaacagtgaccaagctcttccccatggttgaggagatcatgctgcagccactttgggaatcccgagatcgctacgaggagctgaagcggatagatgacgccatgaaagagttacagaagaagactgacagcttgacgtctggggccaccgagaagtccagagagagaagcagagatgtgaaaaacagtgaaggagactgtgcctgaggaaagcggggggcgtggctgcagttctggacgggctggccgagctgcgcgggatccttgtgcagggaagagctgccctgggcacctggcaccacaagaccatgttttctaagaaccattttgttcactgatacaaaaaaaaaaaaaggaattcatgatgctgtacagaattttatttttaaactgtcttttaaataatatattcttatacgg

SEQ ID NO: 10338 - protein, 507 aa, Homo sapiens
MGSGSSSYRPKAIYLDIDGRIQKVIFSKYCNSSDIMDLFCIATGLPRTPYKVRPVAIKQLSEREELIQSVLAQVAEQFSRAFKINELKAEVANHLAVLEKRVELEGLKVVEIEKCKSDIKKMREELAARSSRTNCPCKYSFLDNHKKLTPRRDVPTYPKYLLSPETIEALRKPTFDVWLWEPNEMLSCLEHMYHDLGLVRDFSINPVTLRRWLFCVHDNYRNNPFHNFRHCFCVAQMMYSMVWLCSLQEKFSQTDILILMTAAICHDLDHPGYNNTYQINARTELAVRYNDISPLENHHCAVAFQILAEPECNIFSNIPPDGFKQIRQGMITLILATDMARHAEIMDSFKEKMENFDYSNEEHMTLLKMILIKCCDISNEVRPMEVAEPWVDCLLEEYFMQSDREKSEGLPVAPFMDRDKVTKATAQIGFIKFVLIPMFETVTKLFPMVEEIMLQPLWESRDRYEELKRIDDAMKELQKKTDSLTSGATEKSRERSRDVKNSEGDCA

SEQ ID NO: 10339 - DNA, 1932 bp, Homo sapiens
tcccgcggcggctggcgtcgggaaagtacagtaaaaagtccgagtgcagccgccgggcgcaggatgggatccggctcctccagctaccggcccaaggccatctacctggacatcgatggacgcattcagaaggaacacgaccatctccctgctgaccaccgacgacgccatggtctccatcgaccccaccatgcccgcgaattcagaacgcactccgtacaaagtgagacctgtggccatcaagcaactctccgctggtgtcgaggacaagagaaccacaagccgtggccagtctgctgagagaccactgagggacagacgggttgtgggcctggagcagccccggagggaaggagcatttgaaagtggacaggtagagcccaggcccagagagccccagggctgctaccaggaaggccagcgcatccctccagagcattcaaaatcaatgaactgaaagctgaagttgcaaatcacttggctgtcctagagaaacgcgtggaattggaaggactaaaagtggtggagattgagaaatgcaagagtgacattaagaagatgagggaggagctggcggccagaagcagcaggaccaactgcccctgtaagtacagttttttggataaccacaagaagttgactcctcgacgcgatgttcccacttaccccaagtacctgctctctccagagaccatcgaggccctgcggaagccgacctttgacgtctggctttgggagcccaatgagatgctgagctgcctggagcacatgtaccacgacctcgggctggtcagggacttcagcatcaaccctgtcaccctcaggaggtggctgttctgcgtccacgacaactacagaaacaaccccttccacaacttccggcactgcttctgcgtggcccagatgatgtacagcatggtctggctctgcagtctccaggagaagttctcacaaacggatatcctgatcctaatgacagcggccatctgccacgatctggaccatcccggctacaacaacacgtaccagatcaatgcccgcacagagctggcggtccgctacaatgacatctcaccgctggagaaccaccactgcgccgtggccttccagatcctcgccgagcctgagtgcaacatcttctccaacatcccacctgatgggttcaagcagatccgacagggaatgatcacattaatcttggccactgacatggcaagacatgcagaaattatggattctttcaaagagaaaatggagaattttgactacagcaacgaggagcacatgaccctgctgaagatgattttgataaaatgctgtgatatctctaacgaggtccgtccaatggaagtcgcagagccttgggtggactgtttattagaggaatattttatgcagagcgaccgtgagaagtcagaaggccttcctgtggcaccgttcatggaccgagacaaagtgaccaaggccacagcccagattgggttcatcaagtttgtcctgatcccaatgtttgaaacagtgaccaagctcttccccatggttgaggagatcatgctgcagccactttgggaatcccgagatcgctacgaggagctgaagcggatagatgacgccatgaaagagttacagaagaagactgacagcttgacgtctggggccaccgagaagtccagagagagaagcagagatgtgaaaaacagtgaaggagactgtgcctgaggaaagcggggggcgtggctgcagttctggacgggctggccgagctgcgcgggatccttgtgcagggaagagctgccctgggcacctggcaccacaagaccatgttttctaagaaccattttgttcactgatacaaaaaaaaaaaaaggaattcatgatgctgtacagaattttatttttaaactgtcttttaaataatatattcttatacgg

SEQ ID NO: 10340 - protein, 386 aa, Homo sapiens; identical to SEQ ID NO: 10322

SEQ ID NO: 10341 - DNA, 1708 bp, Homo sapiens
tcccgcggcggctggcgtcgggaaagtacagtaaaaagtccgagtgcagccgccgggcgcaggatgggatccggctcctccagctaccggcccaaggccatctacctggacatcgatggacgcattcagaaggaacacgaccatctccctgctgaccaccgacgacgccatggtctccatcgaccccaccatgcccgcgaattcagaacgagcattcaaaatcaatgaactgaaagctgaagttgcaaatcacttggctgtcctagagaaacgcgtggaattggaaggactaaaagtggtggagattgagaaatgcaagagtgacattaagaagatgagggaggagctggcggccagaagcagcaggaccaactgcccctgtaagtacagttttttggataaccacaagaagttgactcctcgacgcgatgttcccacttaccccaagtacctgctctctccagagaccatcgaggccctgcggaagccgacctttgacgtctggctttgggagcccaatgagatgctgagctgcctggagcacatgtaccacgacctcgggctggtcagggacttcagcatcaaccctgtcaccctcaggaggtggctgttctgcgtccacgacaactacagaaacaaccccttccacaacttccggcactgcttctgcgtggcccagatgatgtacagcatggtctggctctgcagtctccaggagaagttctcacaaacggatatcctgatcctaatgacagcggccatctgccacgatctggaccatcccggctacaacaacacgtaccagatcaatgcccgcacagagctggcggtccgctacaatgacatctcaccgctggagaaccaccactgcgccgtggccttccagatcctcgccgagcctgagtgcaacatcttctccaacatcccacctgatgggttcaagcagatccgacagggaatgatcacattaatcttggccactgacatggcaagacatgcagaaattatggattctttcaaagagaaaatggagaattttgactacagcaacgaggagcacatgaccctgctgaagatgattttgataaaatgctgtgatatctctaacgaggtccgtccaatggaagtcgcagagccttgggtggactgtttattagaggaatattttatgcagagcgaccgtgagaagtcagaaggccttcctgtggcaccgttcatggaccgagacaaagtgaccaaggccacagcccagattgggttcatcaagtttgtcctgatcccaatgtttgaaacagtgaccaagctcttccccatggttgaggagatcatgctgcagccactttgggaatcccgagatcgctacgaggagctgaagcggatagatgacgccatgaaagagttacagaagaagactgacagcttgacgtctggggccaccgagaagtccagagagagaagcagagatgtgaaaaacagtgaaggagactgtgcctgaggaaagcggggggcgtggctgcagttctggacgggctggccgagctgcgcgggatccttgtgcagggaagagctgccctgggcacctggcaccacaagaccatgttttctaagaaccattttgttcactgatacaaaaaaaaaaaaaggaattcatgatgctgtacagaattttatttttaaactgtcttttaaataatatattcttatacgg

SEQ ID NO: 10342 - protein, 459 aa, Homo sapiens
MDAFRRNTTISLLTTDDAMVSIDPTMPANSERAFKINELKAEVANHLAVLEKRVELEGLKVVEIEKCKSDIKKMREELAARSSRTNCPCKYSFLDNHKKLTPRRDVPTYPKYLLSPETIEALRKPTFDVWLWEPNEMLSCLEHMYHDLGLVRDFSINPVTLRRWLFCVHDNYRNNPFHNFRHCFCVAQMMYSMVWLCSLQEKFSQTDILILMTAAICHDLDHPGYNNTYQINARTELAVRYNDISPLENHHCAVAFQILAEPECNIFSNIPPDGFKQIRQGMITLILATDMARHAEIMDSFKEKMENFDYSNEEHMTLLKMILIKCCDISNEVRPMEVAEPWVDCLLEEYFMQSDREKSEGLPVAPFMDRDKVTKATAQIGFIKFVLIPMFETVTKLFPMVEEIMLQPLWESRDRYEELKRIDDAMKELQKKTDSLTSGATEKSRERSRDVKNSEGDCA

SEQ ID NO: 10343 - DNA, 1545 bp, Homo sapiens
tcccgcggcggctggcgtcgggaaagtacagtaaaaagtccgagtgcagccgccgggcgcaggatgggatccggctcctccagctaccggcccaaggccatctacctggacatcgatggacgcattcagaagagcattcaaaatcaatgaactgaaagctgaagttgcaaatcacttggctgtcctagagaaacgcgtggaatgaccaactgcccctgtaagtacagttttttggataaccacaagaagttgactcctcgacgcgatgttcccacttaccccaagtacctgctctctccagagaccatcgaggccctgcggaagccgacctttgacgtctggctttgggagcccaatgagatgctgagctgcctggagcacatgtaccacgacctcgggctggtcagggacttcagcatcaaccctgtcaccctcaggaggtggctgttctgcgtccacgacaactacagaaacaaccccttccacaacttccggcactgcttctgcgtggcccagatgatgtacagcatggtctggctctgcagtctccaggagaagttctcacaaacggatatcctgatcctaatgacagcggccatctgccacgatctggaccatcccggctacaacaacacgtaccagatcaatgcccgcacagagctggcggtccgctacaatgacatctcaccgctggagaaccaccactgcgccgtggccttccagatcctcgccgagcctgagtgcaacatcttctccaacatcccacctgatgggttcaagcagatccgacagggaatgatcacattaatcttggccactgacatggcaagacatgcagaaattatggattctttcaaagagaaaatggagaattttgactacagcaacgaggagcacatgaccctgctgaagatgattttgataaaatgctgtgatatctctaacgaggtccgtccaatggaagtcgcagagccttgggtggactgtttattagaggaatattttatgcagagcgaccgtgagaagtcagaaggccttcctgtggcaccgttcatggaccgagacaaagtgaccaaggccacagcccagattgggttcatcaagtttgtcctgatcccaatgtttgaaacagtgaccaagctcttccccatggttgaggagatcatgctgcagccactttgggaatcccgagatcgctacgaggagctgaagcggatagatgacgccatgaaagagttacagaagaagactgacagcttgacgtctggggccaccgagaagtccagagagagaagcagagatgtgaaaaacagtgaaggagactgtgcctgaggaaagcggggggcgtggctgcagttctggacgggctggccgagctgcgcgggatccttgtgcagggaagagctgccctgggcacctggcaccacaagaccatgttttctaagaaccattttgttcactgatacaaaaaaaaaaaaaggaattcatgatgctgtacagaattttatttttaaactgtcttttaaataatatattcttatacgg

SEQ ID NO: 10344 - protein, 376 aa, Homo sapiens
MTNCPCKYSFLDNHKKLTPRRDVPTYPKYLLSPETIEALRKPTFDVWLWEPNEMLSCLEHMYHDLGLVRDFSINPVTLRRWLFCVHDNYRNNPFHNFRHCFCVAQMMYSMVWLCSLQEKFSQTDILILMTAAICHDLDHPGYNNTYQINARTELAVRYNDISPLENHHCAVAFQILAEPECNIFSNIPPDGFKQIRQGMITLILATDMARHAEIMDSFKEKMENFDYSNEEHMTLLKMILIKCCDISNEVRPMEVAEPWVDCLLEEYFMQSDREKSEGLPVAPFMDRDKVTKATAQIGFIKFVLIPMFETVTKLFPMVEEIMLQPLWESRDRYEELKRIDDAMKELQKKTDSLTSGATEKSRERSRDVKNSEGDCA

SEQ ID NO: 10345 - DNA, 1987 bp, Homo sapiens
tcccgcggcggctggcgtcgggaaagtacagtaaaaagtccgagtgcagccgccgggcgcaggatgggatccggctcctccagctaccggcccaaggccatctacctggacatcgatggacgcattcagaaggaacacgaccatctccctgctgaccaccgacgacgccatggtctccatcgaccccaccatgcccgcgaattcagaacgcactccgtacaaagtgagacctgtggccatcaagcaactctccgctggtgtcgaggacaagagaaccacaagccgtggccagtctgctgagagaccactgagggacagacgggttgtgggcctggagcagccccggagggaaggagcatttgaaagtggacaggtagagcccaggcccagagagccccagggctgctaccaggaaggccagcgcatccctccagagagagaagaattaatccagagcgtgctggcgcaggttgcagagcagttctcaagagcattcaaaatcaatgaactgaaagctgaagttgcaaatcacttggctgtcctagagaaacgcgtggaattggaaggactaaaagtggtggagattgagaaatgcaagagtgacattaagaagatgagggaggagctggcggccagaagcagcaggaccaactgcccctgtaagtacagttttttggataaccacaagaagttgactcctcgacgcgatgttcccacttaccccaagtacctgctctctccagagaccatcgaggccctgcggaagccgacctttgacgtctggctttgggagcccaatgagatgctgagctgcctggagcacatgtaccacgacctcgggctggtcagggacttcagcatcaaccctgtcaccctcaggaggtggctgttctgcgtccacgacaactacagaaacaaccccttccacaacttccggcactgcttctgcgtggcccagatgatgtacagcatggtctggctctgcagtctccaggagaagttctcacaaacggatatcctgatcctaatgacagcggccatctgccacgatctggaccatcccggctacaacaacacgtaccagatcaatgcccgcacagagctggcggtccgctacaatgacatctcaccgctggagaaccaccactgcgccgtggccttccagatcctcgccgagcctgagtgcaacatcttctccaacatcccacctgatgggttcaagcagatccgacagggaatgatcacattaatcttggccactgacatggcaagacatgcagaaattatggattctttcaaagagaaaatggagaattttgactacagcaacgaggagcacatgaccctgctgaagatgattttgataaaatgctgtgatatctctaacgaggtccgtccaatggaagtcgcagagccttgggtggactgtttattagaggaatattttatgcagagcgaccgtgagaagtcagaaggccttcctgtggcaccgttcatggaccgagacaaagtgaccaaggccacagcccagattgggttcatcaagtttgtcctgatcccaatgtttgaaacagtgaccaagctcttccccatggttgaggagatcatgctgcagccactttgggaatcccgagatcgctacgaggagctgaagcggatagatgacgccatgaaagagttacagaagaagactgacagcttgacgtctggggccaccgagaagtccagagagagaagcagagatgtgaaaaacagtgaaggagactgtgcctgaggaaagcggggggcgtggctgcagttctggacgggctggccgagctgcgcgggatccttgtgcagggaagagctgccctgggcacctggcaccacaagaccatgttttctaagaaccattttgttcactgatacaaaaaaaaaaaaaggaattcatgatgctgtacagaattttatttttaaactgtcttttaaataatatattcttatacgg

SEQ ID NO: 10346 - protein, 552 aa, Homo sapiens
MDAFRRNTTISLLTTDDAMVSIDPTMPANSERTPYKVRPVAIKQLSAGVEDKRTTSRGQSAERPLRDRRVVGLEQPRREGAFESGQVEPRPREPQGCYQEGQRIPPEREELIQSVLAQVAEQFSRAFKINELKAEVANHLAVLEKRVELEGLKVVEIEKCKSDIKKMREELAARSSRTNCPCKYSFLDNHKKLTPRRDVPTYPKYLLSPETIEALRKPTFDVWLWEPNEMLSCLEHMYHDLGLVRDFSINPVTLRRWLFCVHDNYRNNPFHNFRHCFCVAQMMYSMVWLCSLQEKFSQTDILILMTAAICHDLDHPGYNNTYQINARTELAVRYNDISPLENHHCAVAFQILAEPECNIFSNIPPDGFKQIRQGMITLILATDMARHAEIMDSFKEKMENFDYSNEEHMTLLKMILIKCCDISNEVRPMEVAEPWVDCLLEEYFMQSDREKSEGLPVAPFMDRDKVTKATAQIGFIKFVLIPMFETVTKLFPMVEEIMLQPLWESRDRYEELKRIDDAMKELQKKTDSLTSGATEKSRERSRDVKNSEGDCA

SEQ ID NO: 10347 - DNA, 1980 bp, Homo sapiens
tcccgcggcggctggcgtcgggaaagtacagtaaaaagtccgagtgcagccgccgggcgcaggatgggatccggctcctccagctaccggcccaaggccatctacctggacatcgatggacgcattcagaaggtaatcttcagcaagtactgcaactccagcgacatcatggacctgttctgcatcgccaccggcctgcctcgcactccgtacaaagtgagacctgtggccatcaagcaactctccgctggtgtcgaggacaagagaaccacaagccgtggccagtctgctgagagaccactgagggacagacgggttgtgggcctggagcagccccggagggaaggagcatttgaaagtggacaggtagagcccaggcccagagagccccagggctgctaccaggaaggccagcgcatccctccagagagagaagaattaatccagagcgtgctggcgcaggttgcagagcagttctcaagagcattcaaaatcaatgaactgaaagctgaagttgcaaatcacttggctgtcctagagaaacgcgtggaattggaaggactaaaagtggtggagattgagaaatgcaagagtgacattaagaagatgagggaggagctggcggccagaagcagcaggaccaactgcccctgtaagtacagttttttggataaccacaagaagttgactcctcgacgcgatgttcccacttaccccaagtacctgctctctccagagaccatcgaggccctgcggaagccgacctttgacgtctggctttgggagcccaatgagatgctgagctgcctggagcacatgtaccacgacctcgggctggtcagggacttcagcatcaaccctgtcaccctcaggaggtggctgttctgcgtccacgacaactacagaaacaaccccttccacaacttccggcactgcttctgcgtggcccagatgatgtacagcatggtctggctctgcagtctccaggagaagttctcacaaacggatatcctgatcctaatgacagcggccatctgccacgatctggaccatcccggctacaacaacacgtaccagatcaatgcccgcacagagctggcggtccgctacaatgacatctcaccgctggagaaccaccactgcgccgtggccttccagatcctcgccgagcctgagtgcaacatcttctccaacatcccacctgatgggttcaagcagatccgacagggaatgatcacattaatcttggccactgacatggcaagacatgcagaaattatggattctttcaaagagaaaatggagaattttgactacagcaacgaggagcacatgaccctgctgaagatgattttgataaaatgctgtgatatctctaacgaggtccgtccaatggaagtcgcagagccttgggtggactgtttattagaggaatattttatgcagagcgaccgtgagaagtcagaaggccttcctgtggcaccgttcatggaccgagacaaagtgaccaaggccacagcccagattgggttcatcaagtttgtcctgatcccaatgtttgaaacagtgaccaagctcttccccatggttgaggagatcatgctgcagccactttgggaatcccgagatcgctacgaggagctgaagcggatagatgacgccatgaaagagttacagaagaagactgacagcttgacgtctggggccaccgagaagtccagagagagaagcagagatgtgaaaaacagtgaaggagactgtgcctgaggaaagcggggggcgtggctgcagttctggacgggctggccgagctgcgcgggatccttgtgcagggaagagctgccctgggcacctggcaccacaagaccatgttttctaagaaccattttgttcactgatacaaaaaaaaaaaaaggaattcatgatgctgtacagaattttatttttaaactgtcttttaaataatatattcttatacgg

SEQ ID NO: 10348 - protein, 567 aa, Homo sapiens
MGSGSSSYRPKAIYLDIDGRIQKVIFSKYCNSSDIMDLFCIATGLPRTPYKVRPVAIKQLSAGVEDKRTTSRGQSAERPLRDRRVVGLEQPRREGAFESGQVEPRPREPQGCYQEGQRIPPEREELIQSVLAQVAEQFSRAFKINELKAEVANHLAVLEKRVELEGLKVVEIEKCKSDIKKMREELAARSSRTNCPCKYSFLDNHKKLTPRRDVPTYPKYLLSPETIEALRKPTFDVWLWEPNEMLSCLEHMYHDLGLVRDFSINPVTLRRWLFCVHDNYRNNPFHNFRHCFCVAQMMYSMVWLCSLQEKFSQTDILILMTAAICHDLDHPGYNNTYQINARTELAVRYNDISPLENHHCAVAFQILAEPECNIFSNIPPDGFKQIRQGMITLILATDMARHAEIMDSFKEKMENFDYSNEEHMTLLKMILIKCCDISNEVRPMEVAEPWVDCLLEEYFMQSDREKSEGLPVAPFMDRDKVTKATAQIGFIKFVLIPMFETVTKLFPMVEEIMLQPLWESRDRYEELKRIDDAMKELQKKTDSLTSGATEKSRERSRDVKNSEGDCA

SEQ ID NO: 10349 - DNA, 1685 bp, Homo sapiens
tcccgcggcggctggcgtcgggaaagtacagtaaaaagtccgagtgcagccgccgggcgcaggatgggatccggctcctccagctaccggcccaaggccatctacctggacatcgatggacgcattcagaagagagagaagaattaatccagagcgtgctggcgcaggttgcagagcagttctcaagagcattcaaaatcaatgaactgaaagctgaagttgcaaatcacttggctgtcctagagaaacgcgtggaattggaaggactaaaagtggtggagattgagaaatgcaagagtgacattaagaagatgagggaggagctggcggccagaagcagcaggaccaactgcccctgtaagtacagttttttggataaccacaagaagttgactcctcgacgcgatgttcccacttaccccaagtacctgctctctccagagaccatcgaggccctgcggaagccgacctttgacgtctggctttgggagcccaatgagatgctgagctgcctggagcacatgtaccacgacctcgggctggtcagggacttcagcatcaaccctgtcaccctcaggaggtggctgttctgcgtccacgacaactacagaaacaaccccttccacaacttccggcactgcttctgcgtggcccagatgatgtacagcatggtctggctctgcagtctccaggagaagttctcacaaacggatatcctgatcctaatgacagcggccatctgccacgatctggaccatcccggctacaacaacacgtaccagatcaatgcccgcacagagctggcggtccgctacaatgacatctcaccgctggagaaccaccactgcgccgtggccttccagatcctcgccgagcctgagtgcaacatcttctccaacatcccacctgatgggttcaagcagatccgacagggaatgatcacattaatcttggccactgacatggcaagacatgcagaaattatggattctttcaaagagaaaatggagaattttgactacagcaacgaggagcacatgaccctgctgaagatgattttgataaaatgctgtgatatctctaacgaggtccgtccaatggaagtcgcagagccttgggtggactgtttattagaggaatattttatgcagagcgaccgtgagaagtcagaaggccttcctgtggcaccgttcatggaccgagacaaagtgaccaaggccacagcccagattgggttcatcaagtttgtcctgatcccaatgtttgaaacagtgaccaagctcttccccatggttgaggagatcatgctgcagccactttgggaatcccgagatcgctacgaggagctgaagcggatagatgacgccatgaaagagttacagaagaagactgacagcttgacgtctggggccaccgagaagtccagagagagaagcagagatgtgaaaaacagtgaaggagactgtgcctgaggaaagcggggggcgtggctgcagttctggacgggctggccgagctgcgcgggatccttgtgcagggaagagctgccctgggcacctggcaccacaagaccatgttttctaagaaccattttgttcactgatacaaaaaaaaaaaaaggaattcatgatgctgtacagaattttatttttaaactgtcttttaaataatatattcttatacgg

SEQ ID NO: 10350 - protein, 386 aa, Homo sapiens; identical to SEQ ID NO: 10322

SEQ ID NO: 10351 - DNA, 1589 bp, Homo sapiens
tcccgcggcggctggcgtcgggaaagtacagtaaaaagtccgagtgcagccgccgggcgcaggatgggatccggctcctccagctaccggcccaaggccatctacctggacatcgatggacgcattcagaagcactccgtacaaagtgagacctgtggccatcaagcaactctccgagcattcaaaatcaatgaactgaaagctgaagttgcaaatcacttggctgtcctagagaaacgcgtggaatgaccaactgcccctgtaagtacagttttttggataaccacaagaagttgactcctcgacgcgatgttcccacttaccccaagtacctgctctctccagagaccatcgaggccctgcggaagccgacctttgacgtctggctttgggagcccaatgagatgctgagctgcctggagcacatgtaccacgacctcgggctggtcagggacttcagcatcaaccctgtcaccctcaggaggtggctgttctgcgtccacgacaactacagaaacaaccccttccacaacttccggcactgcttctgcgtggcccagatgatgtacagcatggtctggctctgcagtctccaggagaagttctcacaaacggatatcctgatcctaatgacagcggccatctgccacgatctggaccatcccggctacaacaacacgtaccagatcaatgcccgcacagagctggcggtccgctacaatgacatctcaccgctggagaaccaccactgcgccgtggccttccagatcctcgccgagcctgagtgcaacatcttctccaacatcccacctgatgggttcaagcagatccgacagggaatgatcacattaatcttggccactgacatggcaagacatgcagaaattatggattctttcaaagagaaaatggagaattttgactacagcaacgaggagcacatgaccctgctgaagatgattttgataaaatgctgtgatatctctaacgaggtccgtccaatggaagtcgcagagccttgggtggactgtttattagaggaatattttatgcagagcgaccgtgagaagtcagaaggccttcctgtggcaccgttcatggaccgagacaaagtgaccaaggccacagcccagattgggttcatcaagtttgtcctgatcccaatgtttgaaacagtgaccaagctcttccccatggttgaggagatcatgctgcagccactttgggaatcccgagatcgctacgaggagctgaagcggatagatgacgccatgaaagagttacagaagaagactgacagcttgacgtctggggccaccgagaagtccagagagagaagcagagatgtgaaaaacagtgaaggagactgtgcctgaggaaagcggggggcgtggctgcagttctggacgggctggccgagctgcgcgggatccttgtgcagggaagagctgccctgggcacctggcaccacaagaccatgttttctaagaaccattttgttcactgatacaaaaaaaaaaaaaggaattcatgatgctgtacagaattttatttttaaactgtcttttaaataatatattcttatacgg

SEQ ID NO: 10352 - protein, 376 aa, Homo sapiens; identical to SEQ ID NO: 10344

SEQ ID NO: 10353 - DNA, 1807 bp, Homo sapiens
tcccgcggcggctggcgtcgggaaagtacagtaaaaagtccgagtgcagccgccgggcgcaggatgggatccggctcctccagctaccggcccaaggccatctacctggacatcgatggacgcattcagaaggaacacgaccatctccctgctgaccaccgacgacgccatggtctccatcgaccccaccatgcccgcgaattcagaacgcactccgtacaaagtgagacctgtggccatcaagcaactctccgagagagaagaattaatccagagcgtgctggcgcaggttgcagagcagttctcaagagcattcaaaatcaatgaactgaaagctgaagttgcaaatcacttggctgtcctagagaaacgcgtggaattggaaggactaaaagtggtggagattgagaaatgcaagagtgacattaagaagatgagggaggagctggcggccagaagcagcaggaccaactgcccctgtaagtacagttttttggataaccacaagaagttgactcctcgacgcgatgttcccacttaccccaagtacctgctctctccagagaccatcgaggccctgcggaagccgacctttgacgtctggctttgggagcccaatgagatgctgagctgcctggagcacatgtaccacgacctcgggctggtcagggacttcagcatcaaccctgtcaccctcaggaggtggctgttctgcgtccacgacaactacagaaacaaccccttccacaacttccggcactgcttctgcgtggcccagatgatgtacagcatggtctggctctgcagtctccaggagaagttctcacaaacggatatcctgatcctaatgacagcggccatctgccacgatctggaccatcccggctacaacaacacgtaccagatcaatgcccgcacagagctggcggtccgctacaatgacatctcaccgctggagaaccaccactgcgccgtggccttccagatcctcgccgagcctgagtgcaacatcttctccaacatcccacctgatgggttcaagcagatccgacagggaatgatcacattaatcttggccactgacatggcaagacatgcagaaattatggattctttcaaagagaaaatggagaattttgactacagcaacgaggagcacatgaccctgctgaagatgattttgataaaatgctgtgatatctctaacgaggtccgtccaatggaagtcgcagagccttgggtggactgtttattagaggaatattttatgcagagcgaccgtgagaagtcagaaggccttcctgtggcaccgttcatggaccgagacaaagtgaccaaggccacagcccagattgggttcatcaagtttgtcctgatcccaatgtttgaaacagtgaccaagctcttccccatggttgaggagatcatgctgcagccactttgggaatcccgagatcgctacgaggagctgaagcggatagatgacgccatgaaagagttacagaagaagactgacagcttgacgtctggggccaccgagaagtccagagagagaagcagagatgtgaaaaacagtgaaggagactgtgcctgaggaaagcggggggcgtggctgcagttctggacgggctggccgagctgcgcgggatccttgtgcagggaagagctgccctgggcacctggcaccacaagaccatgttttctaagaaccattttgttcactgatacaaaaaaaaaaaaaggaattcatgatgctgtacagaattttatttttaaactgtcttttaaataatatattcttatacgg

SEQ ID NO: 10354 - protein, 492 aa, Homo sapiens
MDAFRRNTTISLLTTDDAMVSIDPTMPANSERTPYKVRPVAIKQLSEREELIQSVLAQVAEQFSRAFKINELKAEVANHLAVLEKRVELEGLKVVEIEKCKSDIKKMREELAARSSRTNCPCKYSFLDNHKKLTPRRDVPTYPKYLLSPETIEALRKPTFDVWLWEPNEMLSCLEHMYHDLGLVRDFSINPVTLRRWLFCVHDNYRNNPFHNFRHCFCVAQMMYSMVWLCSLQEKFSQTDILILMTAAICHDLDHPGYNNTYQINARTELAVRYNDISPLENHHCAVAFQILAEPECNIFSNIPPDGFKQIRQGMITLILATDMARHAEIMDSFKEKMENFDYSNEEHMTLLKMILIKCCDISNEVRPMEVAEPWVDCLLEEYFMQSDREKSEGLPVAPFMDRDKVTKATAQIGFIKFVLIPMFETVTKLFPMVEEIMLQPLWESRDRYEELKRIDDAMKELQKKTDSLTSGATEKSRERSRDVKNSEGDCA

SEQ ID NO: 10355 - DNA, 2150 bp, Homo sapiens
cgcggcggctggcgtcgggaaagtacagtaaaaagtccgagtgcagccgccgggcgcaggatgggatccggctcctccagctaccggcccaaggccatctacctggacatcgatggacgcattcagaaggtaatcttcagcaagtactgcaactccagcgacatcatggacctgttctgcatcgccaccggcctgcctcggaacacgaccatctccctgctgaccaccgacgacgccatggtctccatcgaccccaccatgcccgcgaattcagaacgcactccgtacaaagtgagacctgtggccatcaagcaactctccgctggtgtcgaggacaagagaaccacaagccgtggccagtctgctgagagaccactgagggacagacgggttgtgggcctggagcagccccggagggaaggagcatttgaaagtggacaggtagagcccaggcccagagagccccagggctgctaccaggaaggccagcgcatccctccagagagagaagaattaatccagagcgtgctggcgcaggttgcagagcagttctcaagagcattcaaaatcaatgaactgaaagctgaagttgcaaatcacttggctgtcctagagaaacgcgtggaattggaaggactaaaagtggtggagattgagaaatgcaagagtgacattaagaagatgagggaggagctggcggccagaagcagcaggaccaactgcccctgtaagtacagttttttggataaccacaagaagttgactcctcgacgcgatgttcccacttaccccaagtacctgctctctccagagaccatcgaggccctgcggaagccgacctttgacgtctggctttgggagcccaatgagatgctgagctgcctggagcacatgtaccacgacctcgggctggtcagggacttcagcatcaaccctgtcaccctcaggaggtggctgttctgcgtccacgacaactacagaaacaaccccttccacaacttccggcactgcttctgcgtggcccagatgatgtacagcatggtctggctctgcagtctccaggagaagttctcacaaacggatatcctgatcctaatgacagcggccatctgccacgatctggaccatcccggctacaacaacacgtaccagatcaatgcccgcacagagctggcggtccgctacaatgacatctcaccgctggagaaccaccactgcgccgtggccttccagatcctcgccgagcctgagtgcaacatcttctccaacatcccacctgatgggttcaagcagatccgacagggaatgatcacattaatcttggccactgacatggcaagacatgcagaaattatggattctttcaaagagaaaatggagaattttgactacagcaacgaggagcacatgaccctgctgaagatgattttgataaaatgctgtgatatctctaacgaggtccgtccaatggaagtcgcagagccttgggtggactgtttattagaggaatattttatgcagagcgaccgtgagaagtcagaaggccttcctgtggcaccgttcatggaccgagacaaagtgaccaaggccacagcccagattgggttcatcaagtttgtcctgatcccaatgtttgaaacagtgaccaagctcttccccatggttgaggagatcatgctgcagccactttgggaatcccgagatcgctacgaggagctgaagcggatagatgacgccatgaaagagttacagaagaagactgacagcttgacgtctggggccaccgagaagtccagagagagaagcagagatgtgaaaaacagtgaaggagactgtgcctgaggaaagcggggggcgtggctgcagttctggacgggctggccgagctgcgcgggatccttgtgcagggaagagctgccctgggcacctggcaccacaagaccatgttttctaagaaccattttgttcactgatacaaaaaaaaaaaaaggaattcatgatgctgtacagaattttatttttaaactgtcttttaaataatatattcttatacggaaatgggtactgtacttcttctttggtagagttgtgtatgctgcttccggtaagttctctcatggagacgaaggacactgtgcttttcccccaga

SEQ ID NO: 10356 - protein, 593 aa, Homo sapiens; identical to SEQ ID NO: 10336

SEQ ID NO: 10357 - DNA, 993 bp, Homo sapiens
acagtaaaaagtccgagtgcagccgccgggcgcaggatgggatccggctcctccagctaccggcccaaggccatctacctggacatcgatggacgcattcagaaggtaatcttcagcaagtactgcaactccagcgacatcatggacctgttctgcatcgccaccggcctgcctcggaacacgaccatctccctgctgaccaccgacgacgccatggtctccatcgaccccaccatgcccgcgaattcagaacgcactccgtacaaagtgagacctgtggccatcaagcaactctccggtaaggccctgctgtcgttttttaaactaaaagaaggaaaaagaaatcttgagcttgcccctgtgataaaatatatactagttaagcatttgaatctaagcatttgaaatatatatgagttacctttgaagcatttaactatatgttagttaagcatttgaatctgcatttgaagccgatacaactgcagaatctgaaaccttgtactactgtaagggctctgcctttctaaccccagggagaatagcatctgcctggggttagcctcccttgtgtggattttttcttactccttttggccactgcctgttcctggtctatggccgttccattggctgcactgtctgtccctgcccctcggccagaggccatcccaaggactttgcagttgcagggcggcatccactctggtcttcctggcccagcacctgtcctccccgctccactgtgagttgccaaggcaggcatttgtggcccctgggatgccttggggtgcctcatacagttacttgggccgctgtgttacaatcctttttctttttctttttttttttttaaaaaaaaacggagtctggtcctgtcacccagggctggaatgcagtggcacgatctcggctcactgcaacctctgcctcccaagttcaagtgattctcctgcctcaccctcccaggtagctgggattacaggcgtgcac

SEQ ID NO: 10358 - protein, 122 aa, Homo sapiens
MGSGSSSYRPKAIYLDIDGRIQKVIFSKYCNSSDIMDLFCIATGLPRNTTISLLTTDDAMVSIDPTMPANSERTPYKVRPVAIKQLSGKALLSFFKLKEGKRNLELAPVIKYILVKHLNLSI

SEQ ID NO: 10359 - DNA, 812 bp, Homo sapiens
acagtaaaaagtccgagtgcagccgccgggcgcaggatgggatccggctcctccagctaccggcccaaggccatctacctggacatcgatggacgcattcagaaggtaatcttcagcaagtactgcaactccagcgacatcatggacctgttctgcatcgccaccggcctgcctcggaacacgaccatctccctgctgaccaccgacgacgccatggtctccatcgaccccaccatgcccgcgaattcagaacgcactccgtacaaagtgagacctgtggccatcaagcaactctccgatattcatttctccagcaccatttgttgaaaagatgatcttttctcccactgaattaccatgacacctttgtggaaaatcgatgggccatgtatgtgtgagtctttttctggactccagatcctgtcgtgtgaatttacatgtcttaaaacaacagcacaccatcttgactaccgtagataaatagtaggtcttgaaatcaggtactctaagttatctctggtttcttttttctttttcaaaaatgttattgcttttattttcaaataaattttagaatcagtctatgaattgcttccaaaaaaacagtctgctaggattttgactgaagttgcattaaatatacagaccaatgtgggaagaattaatatcttaagaatgttgagtcttctggttcataaatatggtctatctccccattcatttgggtttcctttaatgtttctcaataatgtgttaccattgttaatatgaagtacttaataaatactgataaatacatcactatttcatgt

SEQ ID NO: 10360 - protein, 96 aa, Homo sapiens
MGSGSSSYRPKAIYLDIDGRIQKVIFSKYCNSSDIMDLFCIATGLPRNTTISLLTTDDAMVSIDPTMPANSERTPYKVRPVAIKQLSDIHFSSTIC

SEQ ID NO: 10361 - DNA, 1933 bp, Homo sapiens
acagtaaaaagtccgagtgcagccgccgggcgcaggatgggatccggctcctccagctaccggcccaaggccatctacctggacatcgatggacgcattcagaagctggtgtcgaggacaagagaaccacaagccgtggccagtctgctgagagaccactgagggacagacgggttgtgggcctggagcagccccggagggaaggagcatttgaaagtggacaggtagagcccaggcccagagagccccagggctgctaccaggaaggccagcgcatccctccagagagagaagaattaatccagagcgtgctggcgcaggttgcagagcagttctcaagagcattcaaaatcaatgaactgaaagctgaagttgcaaatcacttggctgtcctagagaaacgcgtggaattggaaggactaaaagtggtggagattgagaaatgcaagagtgacattaagaagatgagggaggagctggcggccagaagcagcaggaccaactgcccctgtaagtacagttttttggataaccacaagaagttgactcctcgacgcgatgttcccacttaccccaagtacctgctctctccagagaccatcgaggccctgcggaagccgacctttgacgtctggctttgggagcccaatgagatgctgagctgcctggagcacatgtaccacgacctcgggctggtcagggacttcagcatcaaccctgtcaccctcaggaggtggctgttctgcgtccacgacaactacagaaacaaccccttccacaacttccggcactgcttctgcgtggcccagatgatgtacagcatggtctggctctgcagtctccaggagaagttctcacaaacggatatcctgatcctaatgacagcggccatctgccacgatctggaccatcccggctacaacaacacgtaccagatcaatgcccgcacagagctggcggtccgctacaatgacatctcaccgctggagaaccaccactgcgccgtggccttccagatcctcgccgagcctgagtgcaacatcttctccaacatcccacctgatgggttcaagcagatccgacagggaatgatcacattaatcttggccactgacatggcaagacatgcagaaattatggattctttcaaagagaaaatggagaattttgactacagcaacgaggagcacatgaccctgctgaagatgattttgataaaatgctgtgatatctctaacgaggtccgtccaatggaagtcgcagagccttgggtggactgtttattagaggaatattttatgcagagcgaccgtgagaagtcagaaggccttcctgtggcaccgttcatggaccgagacaaagtgaccaaggccacagcccagattgggttcatcaagtttgtcctgatcccaatgtttgaaacagtgaccaagctcttccccatggttgaggagatcatgctgcagccactttgggaatcccgagatcgctacgaggagctgaagcggatagatgacgccatgaaagagttacagaagaagactgacagcttgacgtctggggccaccgagaagtccagagagagaagcagagatgtgaaaaacagtgaaggagactgtgcctgaggaaagcggggggcgtggctgcagttctggacgggctggccgagctgcgcgggatccttgtgcagggaagagctgccctgggcacctggcaccacaagaccatgttttctaagaaccattttgttcactgatacaaaaaaaaaaaaaggaattcatgatgctgtacagaattttatttttaaactgtcttttaaataatatattcttatacggaaatgggtactgtacttcttctttggtagagttgtgtatgctgcttccggtaagttctctcatggagacgaaggacactgtgcttttcccccaga

SEQ ID NO: 10362 - protein, 386 aa, Homo sapiens; identical to SEQ ID NO: 10322

SEQ ID NO: 10363 - DNA, 1876 bp, Homo sapiens
acagtaaaaagtccgagtgcagccgccgggcgcaggatgggatccggctcctccagctaccggcccaaggccatctacctggacatcgatggacgcattcagaagcactccgtacaaagtgagacctgtggccatcaagcaactctccgcaaaagaatgcagattttgcattatctaaagaggcggttccgtgagcccactgtgctgagtcacatatattccatcggtagagagaagaattaatccagagcgtgctggcgcaggttgcagagcagttctcaagagcattcaaaatcaatgaactgaaagctgaagttgcaaatcacttggctgtcctagagaaacgcgtggaattggaaggactaaaagtggtggagattgagaaatgcaagagtgacattaagaagatgagggaggagctggcggccagaagcagcaggaccaactgcccctgtaagtacagttttttggataaccacaagaagttgactcctcgacgcgatgttcccacttaccccaagtacctgctctctccagagaccatcgaggccctgcggaagccgacctttgacgtctggctttgggagcccaatgagatgctgagctgcctggagcacatgtaccacgacctcgggctggtcagggacttcagcatcaaccctgtcaccctcaggaggtggctgttctgcgtccacgacaactacagaaacaaccccttccacaacttccggcactgcttctgcgtggcccagatgatgtacagcatggtctggctctgcagtctccaggagaagttctcacaaacggatatcctgatcctaatgacagcggccatctgccacgatctggaccatcccggctacaacaacacgtaccagatcaatgcccgcacagagctggcggtccgctacaatgacatctcaccgctggagaaccaccactgcgccgtggccttccagatcctcgccgagcctgagtgcaacatcttctccaacatcccacctgatgggttcaagcagatccgacagggaatgatcacattaatcttggccactgacatggcaagacatgcagaaattatggattctttcaaagagaaaatggagaattttgactacagcaacgaggagcacatgaccctgctgaagatgattttgataaaatgctgtgatatctctaacgaggtccgtccaatggaagtcgcagagccttgggtggactgtttattagaggaatattttatgcagagcgaccgtgagaagtcagaaggccttcctgtggcaccgttcatggaccgagacaaagtgaccaaggccacagcccagattgggttcatcaagtttgtcctgatcccaatgtttgaaacagtgaccaagctcttccccatggttgaggagatcatgctgcagccactttgggaatcccgagatcgctacgaggagctgaagcggatagatgacgccatgaaagagttacagaagaagactgacagcttgacgtctggggccaccgagaagtccagagagagaagcagagatgtgaaaaacagtgaaggagactgtgcctgaggaaagcggggggcgtggctgcagttctggacgggctggccgagctgcgcgggatccttgtgcagggaagagctgccctgggcacctggcaccacaagaccatgttttctaagaaccattttgttcactgatacaaaaaaaaaaaaaggaattcatgatgctgtacagaattttatttttaaactgtcttttaaataatatattcttatacggaaatgggtactgtacttcttctttggtagagttgtgtatgctgcttccggtaagttctctcatggagacgaaggacactgtgcttttcccccaga

SEQ ID NO: 10364 - protein, 386 aa, Homo sapiens; identical to SEQ ID NO: 10322

SEQ ID NO: 10365 - DNA, 1813 bp, Homo sapiens
acagtaaaaagtccgagtgcagccgccgggcgcaggatgggatccggctcctccagctaccggcccaaggccatctacctggacatcgatggacgcattcagaaggtaatcttcagcaagtactgcaactccagcgacatcatggacctgttctgcatcgccaccggcctgcctcgcactccgtacaaagtgagacctgtggccatcaagcaactctccgagcattcaaaatcaatgaactgaaagctgaagttgcaaatcacttggctgtcctagagaaacgcgtggaattggaaggactaaaagtggtggagattgagaaatgcaagagtgacattaagaagatgagggaggagctggcggccagaagcagcaggaccaactgcccctgtaagtacagttttttggataaccacaagaagttgactcctcgacgcgatgttcccacttaccccaagtacctgctctctccagagaccatcgaggccctgcggaagccgacctttgacgtctggctttgggagcccaatgagatgctgagctgcctggagcacatgtaccacgacctcgggctggtcagggacttcagcatcaaccctgtcaccctcaggaggtggctgttctgcgtccacgacaactacagaaacaaccccttccacaacttccggcactgcttctgcgtggcccagatgatgtacagcatggtctggctctgcagtctccaggagaagttctcacaaacggatatcctgatcctaatgacagcggccatctgccacgatctggaccatcccggctacaacaacacgtaccagatcaatgcccgcacagagctggcggtccgctacaatgacatctcaccgctggagaaccaccactgcgccgtggccttccagatcctcgccgagcctgagtgcaacatcttctccaacatcccacctgatgggttcaagcagatccgacagggaatgatcacattaatcttggccactgacatggcaagacatgcagaaattatggattctttcaaagagaaaatggagaattttgactacagcaacgaggagcacatgaccctgctgaagatgattttgataaaatgctgtgatatctctaacgaggtccgtccaatggaagtcgcagagccttgggtggactgtttattagaggaatattttatgcagagcgaccgtgagaagtcagaaggccttcctgtggcaccgttcatggaccgagacaaagtgaccaaggccacagcccagattgggttcatcaagtttgtcctgatcccaatgtttgaaacagtgaccaagctcttccccatggttgaggagatcatgctgcagccactttgggaatcccgagatcgctacgaggagctgaagcggatagatgacgccatgaaagagttacagaagaagactgacagcttgacgtctggggccaccgagaagtccagagagagaagcagagatgtgaaaaacagtgaaggagactgtgcctgaggaaagcggggggcgtggctgcagttctggacgggctggccgagctgcgcgggatccttgtgcagggaagagctgccctgggcacctggcaccacaagaccatgttttctaagaaccattttgttcactgatacaaaaaaaaaaaaaggaattcatgatgctgtacagaattttatttttaaactgtcttttaaataatatattcttatacggaaatgggtactgtacttcttctttggtagagttgtgtatgctgcttccggtaagttctctcatggagacgaaggacactgtgcttttcccccaga

SEQ ID NO: 10366 - protein, 386 aa, Homo sapiens; identical to SEQ ID NO: 10322

SEQ ID NO: 10367 - DNA, 1875 bp, Homo sapiens
acagtaaaaagtccgagtgcagccgccgggcgcaggatgggatccggctcctccagctaccggcccaaggccatctacctggacatcgatggacgcattcagaaggaacacgaccatctccctgctgaccaccgacgacgccatggtctccatcgaccccaccatgcccgcgaattcagaacgcactccgtacaaagtgagacctgtggccatcaagcaactctccgagagagaagaattaatccagagcgtgctggcgcaggttgcagagcagttctcaagagcattcaaaatcaatgaactgaaagctgaagttgcaaatcacttggctgtcctagagaaacgcgtggaattggaaggactaaaagtggtggagattgagaaatgcaagagtgacattaagaagatgagggaggagctggcggccagaagcagcaggaccaactgcccctgtaagtacagttttttggataaccacaagaagttgactcctcgacgcgatgttcccacttaccccaagtacctgctctctccagagaccatcgaggccctgcggaagccgacctttgacgtctggctttgggagcccaatgagatgctgagctgcctggagcacatgtaccacgacctcgggctggtcagggacttcagcatcaaccctgtcaccctcaggaggtggctgttctgcgtccacgacaactacagaaacaaccccttccacaacttccggcactgcttctgcgtggcccagatgatgtacagcatggtctggctctgcagtctccaggagaagttctcacaaacggatatcctgatcctaatgacagcggccatctgccacgatctggaccatcccggctacaacaacacgtaccagatcaatgcccgcacagagctggcggtccgctacaatgacatctcaccgctggagaaccaccactgcgccgtggccttccagatcctcgccgagcctgagtgcaacatcttctccaacatcccacctgatgggttcaagcagatccgacagggaatgatcacattaatcttggccactgacatggcaagacatgcagaaattatggattctttcaaagagaaaatggagaattttgactacagcaacgaggagcacatgaccctgctgaagatgattttgataaaatgctgtgatatctctaacgaggtccgtccaatggaagtcgcagagccttgggtggactgtttattagaggaatattttatgcagagcgaccgtgagaagtcagaaggccttcctgtggcaccgttcatggaccgagacaaagtgaccaaggccacagcccagattgggttcatcaagtttgtcctgatcccaatgtttgaaacagtgaccaagctcttccccatggttgaggagatcatgctgcagccactttgggaatcccgagatcgctacgaggagctgaagcggatagatgacgccatgaaagagttacagaagaagactgacagcttgacgtctggggccaccgagaagtccagagagagaagcagagatgtgaaaaacagtgaaggagactgtgcctgaggaaagcggggggcgtggctgcagttctggacgggctggccgagctgcgcgggatccttgtgcagggaagagctgccctgggcacctggcaccacaagaccatgttttctaagaaccattttgttcactgatacaaaaaaaaaaaaaggaattcatgatgctgtacagaattttatttttaaactgtcttttaaataatatattcttatacggaaatgggtactgtacttcttctttggtagagttgtgtatgctgcttccggtaagttctctcatggagacgaaggacactgtgcttttcccccaga

SEQ ID NO: 10368 - protein, 492 aa, Homo sapiens; identical to SEQ ID NO: 10354

SEQ ID NO: 10369 - DNA, 1698 bp, Homo sapiens
acagtaaaaagtccgagtgcagccgccgggcgcaggatgggatccggctcctccagctaccggcccaaggccatctacctggacatcgatggacgcattcagaagagcattcaaaatcaatgaactgaaagctgaagttgcaaatcacttggctgtcctagagaaacgcgtggaattggaaggactaaaagtggtggagattgagaaatgcaagagtgacattaagaagatgagggaggagctggcggccagaagcagcaggaccaactgcccctgtaagtacagttttttggataaccacaagaagttgactcctcgacgcgatgttcccacttaccccaagtacctgctctctccagagaccatcgaggccctgcggaagccgacctttgacgtctggctttgggagcccaatgagatgctgagctgcctggagcacatgtaccacgacctcgggctggtcagggacttcagcatcaaccctgtcaccctcaggaggtggctgttctgcgtccacgacaactacagaaacaaccccttccacaacttccggcactgcttctgcgtggcccagatgatgtacagcatggtctggctctgcagtctccaggagaagttctcacaaacggatatcctgatcctaatgacagcggccatctgccacgatctggaccatcccggctacaacaacacgtaccagatcaatgcccgcacagagctggcggtccgctacaatgacatctcaccgctggagaaccaccactgcgccgtggccttccagatcctcgccgagcctgagtgcaacatcttctccaacatcccacctgatgggttcaagcagatccgacagggaatgatcacattaatcttggccactgacatggcaagacatgcagaaattatggattctttcaaagagaaaatggagaattttgactacagcaacgaggagcacatgaccctgctgaagatgattttgataaaatgctgtgatatctctaacgaggtccgtccaatggaagtcgcagagccttgggtggactgtttattagaggaatattttatgcagagcgaccgtgagaagtcagaaggccttcctgtggcaccgttcatggaccgagacaaagtgaccaaggccacagcccagattgggttcatcaagtttgtcctgatcccaatgtttgaaacagtgaccaagctcttccccatggttgaggagatcatgctgcagccactttgggaatcccgagatcgctacgaggagctgaagcggatagatgacgccatgaaagagttacagaagaagactgacagcttgacgtctggggccaccgagaagtccagagagagaagcagagatgtgaaaaacagtgaaggagactgtgcctgaggaaagcggggggcgtggctgcagttctggacgggctggccgagctgcgcgggatccttgtgcagggaagagctgccctgggcacctggcaccacaagaccatgttttctaagaaccattttgttcactgatacaaaaaaaaaaaaaggaattcatgatgctgtacagaattttatttttaaactgtcttttaaataatatattcttatacggaaatgggtactgtacttcttctttggtagagttgtgtatgctgcttccggtaagttctctcatggagacgaaggacactgtgcttttcccccaga

SEQ ID NO: 10370 - protein, 433 aa, Homo sapiens; identical to SEQ ID NO: 10324

SEQ ID NO: 10371 - DNA, 1657 bp, Homo sapiens
acagtaaaaagtccgagtgcagccgccgggcgcaggatgggatccggctcctccagctaccggcccaaggccatctacctggacatcgatggacgcattcagaagcactccgtacaaagtgagacctgtggccatcaagcaactctccgagcattcaaaatcaatgaactgaaagctgaagttgcaaatcacttggctgtcctagagaaacgcgtggaatgaccaactgcccctgtaagtacagttttttggataaccacaagaagttgactcctcgacgcgatgttcccacttaccccaagtacctgctctctccagagaccatcgaggccctgcggaagccgacctttgacgtctggctttgggagcccaatgagatgctgagctgcctggagcacatgtaccacgacctcgggctggtcagggacttcagcatcaaccctgtcaccctcaggaggtggctgttctgcgtccacgacaactacagaaacaaccccttccacaacttccggcactgcttctgcgtggcccagatgatgtacagcatggtctggctctgcagtctccaggagaagttctcacaaacggatatcctgatcctaatgacagcggccatctgccacgatctggaccatcccggctacaacaacacgtaccagatcaatgcccgcacagagctggcggtccgctacaatgacatctcaccgctggagaaccaccactgcgccgtggccttccagatcctcgccgagcctgagtgcaacatcttctccaacatcccacctgatgggttcaagcagatccgacagggaatgatcacattaatcttggccactgacatggcaagacatgcagaaattatggattctttcaaagagaaaatggagaattttgactacagcaacgaggagcacatgaccctgctgaagatgattttgataaaatgctgtgatatctctaacgaggtccgtccaatggaagtcgcagagccttgggtggactgtttattagaggaatattttatgcagagcgaccgtgagaagtcagaaggccttcctgtggcaccgttcatggaccgagacaaagtgaccaaggccacagcccagattgggttcatcaagtttgtcctgatcccaatgtttgaaacagtgaccaagctcttccccatggttgaggagatcatgctgcagccactttgggaatcccgagatcgctacgaggagctgaagcggatagatgacgccatgaaagagttacagaagaagactgacagcttgacgtctggggccaccgagaagtccagagagagaagcagagatgtgaaaaacagtgaaggagactgtgcctgaggaaagcggggggcgtggctgcagttctggacgggctggccgagctgcgcgggatccttgtgcagggaagagctgccctgggcacctggcaccacaagaccatgttttctaagaaccattttgttcactgatacaaaaaaaaaaaaaggaattcatgatgctgtacagaattttatttttaaactgtcttttaaataatatattcttatacggaaatgggtactgtacttcttctttggtagagttgtgtatgctgcttccggtaagttctctcatggagacgaaggacactgtgcttttcccccaga

SEQ ID NO: 10372 - protein, 376 aa, Homo sapiens; identical to SEQ ID NO: 10344

SEQ ID NO: 10373 - DNA, 1776 bp, Homo sapiens
acagtaaaaagtccgagtgcagccgccgggcgcaggatgggatccggctcctccagctaccggcccaaggccatctacctggacatcgatggacgcattcagaaggaacacgaccatctccctgctgaccaccgacgacgccatggtctccatcgaccccaccatgcccgcgaattcagaacgagcattcaaaatcaatgaactgaaagctgaagttgcaaatcacttggctgtcctagagaaacgcgtggaattggaaggactaaaagtggtggagattgagaaatgcaagagtgacattaagaagatgagggaggagctggcggccagaagcagcaggaccaactgcccctgtaagtacagttttttggataaccacaagaagttgactcctcgacgcgatgttcccacttaccccaagtacctgctctctccagagaccatcgaggccctgcggaagccgacctttgacgtctggctttgggagcccaatgagatgctgagctgcctggagcacatgtaccacgacctcgggctggtcagggacttcagcatcaaccctgtcaccctcaggaggtggctgttctgcgtccacgacaactacagaaacaaccccttccacaacttccggcactgcttctgcgtggcccagatgatgtacagcatggtctggctctgcagtctccaggagaagttctcacaaacggatatcctgatcctaatgacagcggccatctgccacgatctggaccatcccggctacaacaacacgtaccagatcaatgcccgcacagagctggcggtccgctacaatgacatctcaccgctggagaaccaccactgcgccgtggccttccagatcctcgccgagcctgagtgcaacatcttctccaacatcccacctgatgggttcaagcagatccgacagggaatgatcacattaatcttggccactgacatggcaagacatgcagaaattatggattctttcaaagagaaaatggagaattttgactacagcaacgaggagcacatgaccctgctgaagatgattttgataaaatgctgtgatatctctaacgaggtccgtccaatggaagtcgcagagccttgggtggactgtttattagaggaatattttatgcagagcgaccgtgagaagtcagaaggccttcctgtggcaccgttcatggaccgagacaaagtgaccaaggccacagcccagattgggttcatcaagtttgtcctgatcccaatgtttgaaacagtgaccaagctcttccccatggttgaggagatcatgctgcagccactttgggaatcccgagatcgctacgaggagctgaagcggatagatgacgccatgaaagagttacagaagaagactgacagcttgacgtctggggccaccgagaagtccagagagagaagcagagatgtgaaaaacagtgaaggagactgtgcctgaggaaagcggggggcgtggctgcagttctggacgggctggccgagctgcgcgggatccttgtgcagggaagagctgccctgggcacctggcaccacaagaccatgttttctaagaaccattttgttcactgatacaaaaaaaaaaaaaggaattcatgatgctgtacagaattttatttttaaactgtcttttaaataatatattcttatacggaaatgggtactgtacttcttctttggtagagttgtgtatgctgcttccggtaagttctctcatggagacgaaggacactgtgcttttcccccaga

SEQ ID NO: 10374 - protein, 459 aa, Homo sapiens; identical to SEQ ID NO: 10342

SEQ ID NO: 10375 - DNA, 2055 bp, Homo sapiens
acagtaaaaagtccgagtgcagccgccgggcgcaggatgggatccggctcctccagctaccggcccaaggccatctacctggacatcgatggacgcattcagaaggaacacgaccatctccctgctgaccaccgacgacgccatggtctccatcgaccccaccatgcccgcgaattcagaacgcactccgtacaaagtgagacctgtggccatcaagcaactctccgctggtgtcgaggacaagagaaccacaagccgtggccagtctgctgagagaccactgagggacagacgggttgtgggcctggagcagccccggagggaaggagcatttgaaagtggacaggtagagcccaggcccagagagccccagggctgctaccaggaaggccagcgcatccctccagagagagaagaattaatccagagcgtgctggcgcaggttgcagagcagttctcaagagcattcaaaatcaatgaactgaaagctgaagttgcaaatcacttggctgtcctagagaaacgcgtggaattggaaggactaaaagtggtggagattgagaaatgcaagagtgacattaagaagatgagggaggagctggcggccagaagcagcaggaccaactgcccctgtaagtacagttttttggataaccacaagaagttgactcctcgacgcgatgttcccacttaccccaagtacctgctctctccagagaccatcgaggccctgcggaagccgacctttgacgtctggctttgggagcccaatgagatgctgagctgcctggagcacatgtaccacgacctcgggctggtcagggacttcagcatcaaccctgtcaccctcaggaggtggctgttctgcgtccacgacaactacagaaacaaccccttccacaacttccggcactgcttctgcgtggcccagatgatgtacagcatggtctggctctgcagtctccaggagaagttctcacaaacggatatcctgatcctaatgacagcggccatctgccacgatctggaccatcccggctacaacaacacgtaccagatcaatgcccgcacagagctggcggtccgctacaatgacatctcaccgctggagaaccaccactgcgccgtggccttccagatcctcgccgagcctgagtgcaacatcttctccaacatcccacctgatgggttcaagcagatccgacagggaatgatcacattaatcttggccactgacatggcaagacatgcagaaattatggattctttcaaagagaaaatggagaattttgactacagcaacgaggagcacatgaccctgctgaagatgattttgataaaatgctgtgatatctctaacgaggtccgtccaatggaagtcgcagagccttgggtggactgtttattagaggaatattttatgcagagcgaccgtgagaagtcagaaggccttcctgtggcaccgttcatggaccgagacaaagtgaccaaggccacagcccagattgggttcatcaagtttgtcctgatcccaatgtttgaaacagtgaccaagctcttccccatggttgaggagatcatgctgcagccactttgggaatcccgagatcgctacgaggagctgaagcggatagatgacgccatgaaagagttacagaagaagactgacagcttgacgtctggggccaccgagaagtccagagagagaagcagagatgtgaaaaacagtgaaggagactgtgcctgaggaaagcggggggcgtggctgcagttctggacgggctggccgagctgcgcgggatccttgtgcagggaagagctgccctgggcacctggcaccacaagaccatgttttctaagaaccattttgttcactgatacaaaaaaaaaaaaaggaattcatgatgctgtacagaattttatttttaaactgtcttttaaataatatattcttatacggaaatgggtactgtacttcttctttggtagagttgtgtatgctgcttccggtaagttctctcatggagacgaaggacactgtgcttttcccccaga

SEQ ID NO: 10376 - protein, 552 aa, Homo sapiens; identical to SEQ ID NO: 10346

SEQ ID NO: 10377 - DNA, 1742 bp, Homo sapiens
acagtaaaaagtccgagtgcagccgccgggcgcaggatgggatccggctcctccagctaccggcccaaggccatctacctggacatcgatggacgcattcagaagcactccgtacaaagtgagacctgtggccatcaagcaactctccgagcattcaaaatcaatgaactgaaagctgaagttgcaaatcacttggctgtcctagagaaacgcgtggaattggaaggactaaaagtggtggagattgagaaatgcaagagtgacattaagaagatgagggaggagctggcggccagaagcagcaggaccaactgcccctgtaagtacagttttttggataaccacaagaagttgactcctcgacgcgatgttcccacttaccccaagtacctgctctctccagagaccatcgaggccctgcggaagccgacctttgacgtctggctttgggagcccaatgagatgctgagctgcctggagcacatgtaccacgacctcgggctggtcagggacttcagcatcaaccctgtcaccctcaggaggtggctgttctgcgtccacgacaactacagaaacaaccccttccacaacttccggcactgcttctgcgtggcccagatgatgtacagcatggtctggctctgcagtctccaggagaagttctcacaaacggatatcctgatcctaatgacagcggccatctgccacgatctggaccatcccggctacaacaacacgtaccagatcaatgcccgcacagagctggcggtccgctacaatgacatctcaccgctggagaaccaccactgcgccgtggccttccagatcctcgccgagcctgagtgcaacatcttctccaacatcccacctgatgggttcaagcagatccgacagggaatgatcacattaatcttggccactgacatggcaagacatgcagaaattatggattctttcaaagagaaaatggagaattttgactacagcaacgaggagcacatgaccctgctgaagatgattttgataaaatgctgtgatatctctaacgaggtccgtccaatggaagtcgcagagccttgggtggactgtttattagaggaatattttatgcagagcgaccgtgagaagtcagaaggccttcctgtggcaccgttcatggaccgagacaaagtgaccaaggccacagcccagattgggttcatcaagtttgtcctgatcccaatgtttgaaacagtgaccaagctcttccccatggttgaggagatcatgctgcagccactttgggaatcccgagatcgctacgaggagctgaagcggatagatgacgccatgaaagagttacagaagaagactgacagcttgacgtctggggccaccgagaagtccagagagagaagcagagatgtgaaaaacagtgaaggagactgtgcctgaggaaagcggggggcgtggctgcagttctggacgggctggccgagctgcgcgggatccttgtgcagggaagagctgccctgggcacctggcaccacaagaccatgttttctaagaaccattttgttcactgatacaaaaaaaaaaaaaggaattcatgatgctgtacagaattttatttttaaactgtcttttaaataatatattcttatacggaaatgggtactgtacttcttctttggtagagttgtgtatgctgcttccggtaagttctctcatggagacgaaggacactgtgcttttcccccaga

SEQ ID NO: 10378 - protein, 465 aa, Homo sapiens; identical to SEQ ID NO: 10332

SEQ ID NO: 10379 - DNA, 2048 bp, Homo sapiens
acagtaaaaagtccgagtgcagccgccgggcgcaggatgggatccggctcctccagctaccggcccaaggccatctacctggacatcgatggacgcattcagaaggtaatcttcagcaagtactgcaactccagcgacatcatggacctgttctgcatcgccaccggcctgcctcgcactccgtacaaagtgagacctgtggccatcaagcaactctccgctggtgtcgaggacaagagaaccacaagccgtggccagtctgctgagagaccactgagggacagacgggttgtgggcctggagcagccccggagggaaggagcatttgaaagtggacaggtagagcccaggcccagagagccccagggctgctaccaggaaggccagcgcatccctccagagagagaagaattaatccagagcgtgctggcgcaggttgcagagcagttctcaagagcattcaaaatcaatgaactgaaagctgaagttgcaaatcacttggctgtcctagagaaacgcgtggaattggaaggactaaaagtggtggagattgagaaatgcaagagtgacattaagaagatgagggaggagctggcggccagaagcagcaggaccaactgcccctgtaagtacagttttttggataaccacaagaagttgactcctcgacgcgatgttcccacttaccccaagtacctgctctctccagagaccatcgaggccctgcggaagccgacctttgacgtctggctttgggagcccaatgagatgctgagctgcctggagcacatgtaccacgacctcgggctggtcagggacttcagcatcaaccctgtcaccctcaggaggtggctgttctgcgtccacgacaactacagaaacaaccccttccacaacttccggcactgcttctgcgtggcccagatgatgtacagcatggtctggctctgcagtctccaggagaagttctcacaaacggatatcctgatcctaatgacagcggccatctgccacgatctggaccatcccggctacaacaacacgtaccagatcaatgcccgcacagagctggcggtccgctacaatgacatctcaccgctggagaaccaccactgcgccgtggccttccagatcctcgccgagcctgagtgcaacatcttctccaacatcccacctgatgggttcaagcagatccgacagggaatgatcacattaatcttggccactgacatggcaagacatgcagaaattatggattctttcaaagagaaaatggagaattttgactacagcaacgaggagcacatgaccctgctgaagatgattttgataaaatgctgtgatatctctaacgaggtccgtccaatggaagtcgcagagccttgggtggactgtttattagaggaatattttatgcagagcgaccgtgagaagtcagaaggccttcctgtggcaccgttcatggaccgagacaaagtgaccaaggccacagcccagattgggttcatcaagtttgtcctgatcccaatgtttgaaacagtgaccaagctcttccccatggttgaggagatcatgctgcagccactttgggaatcccgagatcgctacgaggagctgaagcggatagatgacgccatgaaagagttacagaagaagactgacagcttgacgtctggggccaccgagaagtccagagagagaagcagagatgtgaaaaacagtgaaggagactgtgcctgaggaaagcggggggcgtggctgcagttctggacgggctggccgagctgcgcgggatccttgtgcagggaagagctgccctgggcacctggcaccacaagaccatgttttctaagaaccattttgttcactgatacaaaaaaaaaaaaaggaattcatgatgctgtacagaattttatttttaaactgtcttttaaataatatattcttatacggaaatgggtactgtacttcttctttggtagagttgtgtatgctgcttccggtaagttctctcatggagacgaaggacactgtgcttttcccccaga

SEQ ID NO: 10380 - protein, 567 aa, Homo sapiens; identical to SEQ ID NO: 10348

SEQ ID NO: 10381 - DNA, 1753 bp, Homo sapiens
acagtaaaaagtccgagtgcagccgccgggcgcaggatgggatccggctcctccagctaccggcccaaggccatctacctggacatcgatggacgcattcagaagagagagaagaattaatccagagcgtgctggcgcaggttgcagagcagttctcaagagcattcaaaatcaatgaactgaaagctgaagttgcaaatcacttggctgtcctagagaaacgcgtggaattggaaggactaaaagtggtggagattgagaaatgcaagagtgacattaagaagatgagggaggagctggcggccagaagcagcaggaccaactgcccctgtaagtacagttttttggataaccacaagaagttgactcctcgacgcgatgttcccacttaccccaagtacctgctctctccagagaccatcgaggccctgcggaagccgacctttgacgtctggctttgggagcccaatgagatgctgagctgcctggagcacatgtaccacgacctcgggctggtcagggacttcagcatcaaccctgtcaccctcaggaggtggctgttctgcgtccacgacaactacagaaacaaccccttccacaacttccggcactgcttctgcgtggcccagatgatgtacagcatggtctggctctgcagtctccaggagaagttctcacaaacggatatcctgatcctaatgacagcggccatctgccacgatctggaccatcccggctacaacaacacgtaccagatcaatgcccgcacagagctggcggtccgctacaatgacatctcaccgctggagaaccaccactgcgccgtggccttccagatcctcgccgagcctgagtgcaacatcttctccaacatcccacctgatgggttcaagcagatccgacagggaatgatcacattaatcttggccactgacatggcaagacatgcagaaattatggattctttcaaagagaaaatggagaattttgactacagcaacgaggagcacatgaccctgctgaagatgattttgataaaatgctgtgatatctctaacgaggtccgtccaatggaagtcgcagagccttgggtggactgtttattagaggaatattttatgcagagcgaccgtgagaagtcagaaggccttcctgtggcaccgttcatggaccgagacaaagtgaccaaggccacagcccagattgggttcatcaagtttgtcctgatcccaatgtttgaaacagtgaccaagctcttccccatggttgaggagatcatgctgcagccactttgggaatcccgagatcgctacgaggagctgaagcggatagatgacgccatgaaagagttacagaagaagactgacagcttgacgtctggggccaccgagaagtccagagagagaagcagagatgtgaaaaacagtgaaggagactgtgcctgaggaaagcggggggcgtggctgcagttctggacgggctggccgagctgcgcgggatccttgtgcagggaagagctgccctgggcacctggcaccacaagaccatgttttctaagaaccattttgttcactgatacaaaaaaaaaaaaaggaattcatgatgctgtacagaattttatttttaaactgtcttttaaataatatattcttatacggaaatgggtactgtacttcttctttggtagagttgtgtatgctgcttccggtaagttctctcatggagacgaaggacactgtgcttttcccccaga

SEQ ID NO: 10382 - protein, 386 aa, Homo sapiens; identical to SEQ ID NO: 10322

SEQ ID NO: 10383 - DNA, 2000 bp, Homo sapiens
acagtaaaaagtccgagtgcagccgccgggcgcaggatgggatccggctcctccagctaccggcccaaggccatctacctggacatcgatggacgcattcagaaggaacacgaccatctccctgctgaccaccgacgacgccatggtctccatcgaccccaccatgcccgcgaattcagaacgcactccgtacaaagtgagacctgtggccatcaagcaactctccgctggtgtcgaggacaagagaaccacaagccgtggccagtctgctgagagaccactgagggacagacgggttgtgggcctggagcagccccggagggaaggagcatttgaaagtggacaggtagagcccaggcccagagagccccagggctgctaccaggaaggccagcgcatccctccagagcattcaaaatcaatgaactgaaagctgaagttgcaaatcacttggctgtcctagagaaacgcgtggaattggaaggactaaaagtggtggagattgagaaatgcaagagtgacattaagaagatgagggaggagctggcggccagaagcagcaggaccaactgcccctgtaagtacagttttttggataaccacaagaagttgactcctcgacgcgatgttcccacttaccccaagtacctgctctctccagagaccatcgaggccctgcggaagccgacctttgacgtctggctttgggagcccaatgagatgctgagctgcctggagcacatgtaccacgacctcgggctggtcagggacttcagcatcaaccctgtcaccctcaggaggtggctgttctgcgtccacgacaactacagaaacaaccccttccacaacttccggcactgcttctgcgtggcccagatgatgtacagcatggtctggctctgcagtctccaggagaagttctcacaaacggatatcctgatcctaatgacagcggccatctgccacgatctggaccatcccggctacaacaacacgtaccagatcaatgcccgcacagagctggcggtccgctacaatgacatctcaccgctggagaaccaccactgcgccgtggccttccagatcctcgccgagcctgagtgcaacatcttctccaacatcccacctgatgggttcaagcagatccgacagggaatgatcacattaatcttggccactgacatggcaagacatgcagaaattatggattctttcaaagagaaaatggagaattttgactacagcaacgaggagcacatgaccctgctgaagatgattttgataaaatgctgtgatatctctaacgaggtccgtccaatggaagtcgcagagccttgggtggactgtttattagaggaatattttatgcagagcgaccgtgagaagtcagaaggccttcctgtggcaccgttcatggaccgagacaaagtgaccaaggccacagcccagattgggttcatcaagtttgtcctgatcccaatgtttgaaacagtgaccaagctcttccccatggttgaggagatcatgctgcagccactttgggaatcccgagatcgctacgaggagctgaagcggatagatgacgccatgaaagagttacagaagaagactgacagcttgacgtctggggccaccgagaagtccagagagagaagcagagatgtgaaaaacagtgaaggagactgtgcctgaggaaagcggggggcgtggctgcagttctggacgggctggccgagctgcgcgggatccttgtgcagggaagagctgccctgggcacctggcaccacaagaccatgttttctaagaaccattttgttcactgatacaaaaaaaaaaaaaggaattcatgatgctgtacagaattttatttttaaactgtcttttaaataatatattcttatacggaaatgggtactgtacttcttctttggtagagttgtgtatgctgcttccggtaagttctctcatggagacgaaggacactgtgcttttcccccaga

SEQ ID NO: 10384 - protein, 386 aa, Homo sapiens; identical to SEQ ID NO: 10322

SEQ ID NO: 10385 - DNA, 1977 bp, Homo sapiens
acagtaaaaagtccgagtgcagccgccgggcgcaggatgggatccggctcctccagctaccggcccaaggccatctacctggacatcgatggacgcattcagaagcactccgtacaaagtgagacctgtggccatcaagcaactctccgctggtgtcgaggacaagagaaccacaagccgtggccagtctgctgagagaccactgagggacagacgggttgtgggcctggagcagccccggagggaaggagcatttgaaagtggacaggtagagcccaggcccagagagccccagggctgctaccaggaaggccagcgcatccctccagagagagaagaattaatccagagcgtgctggcgcaggttgcagagcagttctcaagagcattcaaaatcaatgaactgaaagctgaagttgcaaatcacttggctgtcctagagaaacgcgtggaattggaaggactaaaagtggtggagattgagaaatgcaagagtgacattaagaagatgagggaggagctggcggccagaagcagcaggaccaactgcccctgtaagtacagttttttggataaccacaagaagttgactcctcgacgcgatgttcccacttaccccaagtacctgctctctccagagaccatcgaggccctgcggaagccgacctttgacgtctggctttgggagcccaatgagatgctgagctgcctggagcacatgtaccacgacctcgggctggtcagggacttcagcatcaaccctgtcaccctcaggaggtggctgttctgcgtccacgacaactacagaaacaaccccttccacaacttccggcactgcttctgcgtggcccagatgatgtacagcatggtctggctctgcagtctccaggagaagttctcacaaacggatatcctgatcctaatgacagcggccatctgccacgatctggaccatcccggctacaacaacacgtaccagatcaatgcccgcacagagctggcggtccgctacaatgacatctcaccgctggagaaccaccactgcgccgtggccttccagatcctcgccgagcctgagtgcaacatcttctccaacatcccacctgatgggttcaagcagatccgacagggaatgatcacattaatcttggccactgacatggcaagacatgcagaaattatggattctttcaaagagaaaatggagaattttgactacagcaacgaggagcacatgaccctgctgaagatgattttgataaaatgctgtgatatctctaacgaggtccgtccaatggaagtcgcagagccttgggtggactgtttattagaggaatattttatgcagagcgaccgtgagaagtcagaaggccttcctgtggcaccgttcatggaccgagacaaagtgaccaaggccacagcccagattgggttcatcaagtttgtcctgatcccaatgtttgaaacagtgaccaagctcttccccatggttgaggagatcatgctgcagccactttgggaatcccgagatcgctacgaggagctgaagcggatagatgacgccatgaaagagttacagaagaagactgacagcttgacgtctggggccaccgagaagtccagagagagaagcagagatgtgaaaaacagtgaaggagactgtgcctgaggaaagcggggggcgtggctgcagttctggacgggctggccgagctgcgcgggatccttgtgcagggaagagctgccctgggcacctggcaccacaagaccatgttttctaagaaccattttgttcactgatacaaaaaaaaaaaaaggaattcatgatgctgtacagaattttatttttaaactgtcttttaaataatatattcttatacggaaatgggtactgtacttcttctttggtagagttgtgtatgctgcttccggtaagttctctcatggagacgaaggacactgtgcttttcccccaga

SEQ ID NO: 10386 - protein, 526 aa, Homo sapiens; identical to SEQ ID NO: 10334

SEQ ID NO: 10387 - DNA, 1868 bp, Homo sapiens
acagtaaaaagtccgagtgcagccgccgggcgcaggatgggatccggctcctccagctaccggcccaaggccatctacctggacatcgatggacgcattcagaaggtaatcttcagcaagtactgcaactccagcgacatcatggacctgttctgcatcgccaccggcctgcctcgcactccgtacaaagtgagacctgtggccatcaagcaactctccgagagagaagaattaatccagagcgtgctggcgcaggttgcagagcagttctcaagagcattcaaaatcaatgaactgaaagctgaagttgcaaatcacttggctgtcctagagaaacgcgtggaattggaaggactaaaagtggtggagattgagaaatgcaagagtgacattaagaagatgagggaggagctggcggccagaagcagcaggaccaactgcccctgtaagtacagttttttggataaccacaagaagttgactcctcgacgcgatgttcccacttaccccaagtacctgctctctccagagaccatcgaggccctgcggaagccgacctttgacgtctggctttgggagcccaatgagatgctgagctgcctggagcacatgtaccacgacctcgggctggtcagggacttcagcatcaaccctgtcaccctcaggaggtggctgttctgcgtccacgacaactacagaaacaaccccttccacaacttccggcactgcttctgcgtggcccagatgatgtacagcatggtctggctctgcagtctccaggagaagttctcacaaacggatatcctgatcctaatgacagcggccatctgccacgatctggaccatcccggctacaacaacacgtaccagatcaatgcccgcacagagctggcggtccgctacaatgacatctcaccgctggagaaccaccactgcgccgtggccttccagatcctcgccgagcctgagtgcaacatcttctccaacatcccacctgatgggttcaagcagatccgacagggaatgatcacattaatcttggccactgacatggcaagacatgcagaaattatggattctttcaaagagaaaatggagaattttgactacagcaacgaggagcacatgaccctgctgaagatgattttgataaaatgctgtgatatctctaacgaggtccgtccaatggaagtcgcagagccttgggtggactgtttattagaggaatattttatgcagagcgaccgtgagaagtcagaaggccttcctgtggcaccgttcatggaccgagacaaagtgaccaaggccacagcccagattgggttcatcaagtttgtcctgatcccaatgtttgaaacagtgaccaagctcttccccatggttgaggagatcatgctgcagccactttgggaatcccgagatcgctacgaggagctgaagcggatagatgacgccatgaaagagttacagaagaagactgacagcttgacgtctggggccaccgagaagtccagagagagaagcagagatgtgaaaaacagtgaaggagactgtgcctgaggaaagcggggggcgtggctgcagttctggacgggctggccgagctgcgcgggatccttgtgcagggaagagctgccctgggcacctggcaccacaagaccatgttttctaagaaccattttgttcactgatacaaaaaaaaaaaaaggaattcatgatgctgtacagaattttatttttaaactgtcttttaaataatatattcttatacggaaatgggtactgtacttcttctttggtagagttgtgtatgctgcttccggtaagttctctcatggagacgaaggacactgtgcttttcccccaga

SEQ ID NO: 10388 - protein, 507 aa, Homo sapiens; identical to SEQ ID NO: 10338

SEQ ID NO: 10389 - DNA, 1613 bp, Homo sapiens
acagtaaaaagtccgagtgcagccgccgggcgcaggatgggatccggctcctccagctaccggcccaaggccatctacctggacatcgatggacgcattcagaagagcattcaaaatcaatgaactgaaagctgaagttgcaaatcacttggctgtcctagagaaacgcgtggaatgaccaactgcccctgtaagtacagttttttggataaccacaagaagttgactcctcgacgcgatgttcccacttaccccaagtacctgctctctccagagaccatcgaggccctgcggaagccgacctttgacgtctggctttgggagcccaatgagatgctgagctgcctggagcacatgtaccacgacctcgggctggtcagggacttcagcatcaaccctgtcaccctcaggaggtggctgttctgcgtccacgacaactacagaaacaaccccttccacaacttccggcactgcttctgcgtggcccagatgatgtacagcatggtctggctctgcagtctccaggagaagttctcacaaacggatatcctgatcctaatgacagcggccatctgccacgatctggaccatcccggctacaacaacacgtaccagatcaatgcccgcacagagctggcggtccgctacaatgacatctcaccgctggagaaccaccactgcgccgtggccttccagatcctcgccgagcctgagtgcaacatcttctccaacatcccacctgatgggttcaagcagatccgacagggaatgatcacattaatcttggccactgacatggcaagacatgcagaaattatggattctttcaaagagaaaatggagaattttgactacagcaacgaggagcacatgaccctgctgaagatgattttgataaaatgctgtgatatctctaacgaggtccgtccaatggaagtcgcagagccttgggtggactgtttattagaggaatattttatgcagagcgaccgtgagaagtcagaaggccttcctgtggcaccgttcatggaccgagacaaagtgaccaaggccacagcccagattgggttcatcaagtttgtcctgatcccaatgtttgaaacagtgaccaagctcttccccatggttgaggagatcatgctgcagccactttgggaatcccgagatcgctacgaggagctgaagcggatagatgacgccatgaaagagttacagaagaagactgacagcttgacgtctggggccaccgagaagtccagagagagaagcagagatgtgaaaaacagtgaaggagactgtgcctgaggaaagcggggggcgtggctgcagttctggacgggctggccgagctgcgcgggatccttgtgcagggaagagctgccctgggcacctggcaccacaagaccatgttttctaagaaccattttgttcactgatacaaaaaaaaaaaaaggaattcatgatgctgtacagaattttatttttaaactgtcttttaaataatatattcttatacggaaatgggtactgtacttcttctttggtagagttgtgtatgctgcttccggtaagttctctcatggagacgaaggacactgtgcttttcccccaga

SEQ ID NO: 10390 - protein, 376 aa, Homo sapiens; identical to SEQ ID NO: 10344

SEQ ID NO: 10391 - DNA, 1820 bp, Homo sapiens
acagtaaaaagtccgagtgcagccgccgggcgcaggatgggatccggctcctccagctaccggcccaaggccatctacctggacatcgatggacgcattcagaaggaacacgaccatctccctgctgaccaccgacgacgccatggtctccatcgaccccaccatgcccgcgaattcagaacgcactccgtacaaagtgagacctgtggccatcaagcaactctccgagcattcaaaatcaatgaactgaaagctgaagttgcaaatcacttggctgtcctagagaaacgcgtggaattggaaggactaaaagtggtggagattgagaaatgcaagagtgacattaagaagatgagggaggagctggcggccagaagcagcaggaccaactgcccctgtaagtacagttttttggataaccacaagaagttgactcctcgacgcgatgttcccacttaccccaagtacctgctctctccagagaccatcgaggccctgcggaagccgacctttgacgtctggctttgggagcccaatgagatgctgagctgcctggagcacatgtaccacgacctcgggctggtcagggacttcagcatcaaccctgtcaccctcaggaggtggctgttctgcgtccacgacaactacagaaacaaccccttccacaacttccggcactgcttctgcgtggcccagatgatgtacagcatggtctggctctgcagtctccaggagaagttctcacaaacggatatcctgatcctaatgacagcggccatctgccacgatctggaccatcccggctacaacaacacgtaccagatcaatgcccgcacagagctggcggtccgctacaatgacatctcaccgctggagaaccaccactgcgccgtggccttccagatcctcgccgagcctgagtgcaacatcttctccaacatcccacctgatgggttcaagcagatccgacagggaatgatcacattaatcttggccactgacatggcaagacatgcagaaattatggattctttcaaagagaaaatggagaattttgactacagcaacgaggagcacatgaccctgctgaagatgattttgataaaatgctgtgatatctctaacgaggtccgtccaatggaagtcgcagagccttgggtggactgtttattagaggaatattttatgcagagcgaccgtgagaagtcagaaggccttcctgtggcaccgttcatggaccgagacaaagtgaccaaggccacagcccagattgggttcatcaagtttgtcctgatcccaatgtttgaaacagtgaccaagctcttccccatggttgaggagatcatgctgcagccactttgggaatcccgagatcgctacgaggagctgaagcggatagatgacgccatgaaagagttacagaagaagactgacagcttgacgtctggggccaccgagaagtccagagagagaagcagagatgtgaaaaacagtgaaggagactgtgcctgaggaaagcggggggcgtggctgcagttctggacgggctggccgagctgcgcgggatccttgtgcagggaagagctgccctgggcacctggcaccacaagaccatgttttctaagaaccattttgttcactgatacaaaaaaaaaaaaaggaattcatgatgctgtacagaattttatttttaaactgtcttttaaataatatattcttatacggaaatgggtactgtacttcttctttggtagagttgtgtatgctgcttccggtaagttctctcatggagacgaaggacactgtgcttttcccccaga

SEQ ID NO: 10392 - protein, 491 aa, Homo sapiens; identical to SEQ ID NO: 10320

SEQ ID NO: 10393 - DNA, 2365 bp, Homo sapiens
tagacaccagtcctgtaggattagggccctacccttacgactctctttaaattaatgacttccttaaaggctcaatctccaaatatagttactggggtttagggtctcagtatatgaatttggagggcacacaactcagtctatagcactgatgcctccatcaaaaataccccatgtgacagctggttgaggaggattaacctcgaaccaccttattctcaatgccatttaggctgtagcacactttcttccaatcttatgctttttgtttccaagtagaaaagaaacgctttactgaagaggccaccaaatacttccgggagagagtcagcccagtgcatctgcaaatcctgctgactaacaatgaagcctggaagagattcgtgactgcggctgaattgcccagggatgaggcagatgctctctacgaagctctgaagaagcttagaacatatgcagctattgaggacgaatatgtgcagcagaaagatgagcagtttagggaatggtttttgaaagagtttccccaagtcaagaggaagatccaggagtccatagaaaagcttcgtgcccttgcaaatggtattgaagaggtccacagaggctgcaccatctccaatgtggtgtccagctccactggcgctgcctctggcatcatgtcccttgctggtcttgttttggcaccatttacagcagggacgagtctggcccttactgcagctggggtagggctgggagcagcgtctgctgtgactgggatcaccaccagcatcgtggagcactcatacacatcatcagcagaagctgaagccagcaggctgactgcaaccagcattgaccgattgaaggtatttaaggaagttatgcgtgacatcacacccaacttactttcccttcttaataattattacgaagccacacaaaccattgggagtgaaatccgtgccatcaggcaagccagagccagggcccgactccctgtgaccacctggcgaatctcagctggaagtggtggtcaagcagagagaacgattgcaggcaccacccgggcagtgagcagaggagcccggatcctgagtgcgaccacttcaggcatcttccttgcactggatgtggtcaaccttgtatacgagtcaaagcacttgcatgagggggcaaagtctgcatctgctgaggagctgaggcggcaggctcaggagctggaggagaatctaatggagctcactcagatctatcagcgtctgaatccatgccatacccactgaccccagaccagtgcagccagcaggggaggtgagccatacacaggccacgacaaaatgcaggcattttattagggggataaagagggcaaggtaaagtttatggagctgagtgttagtgactttggcatttctgtagctgagcacagcaggggaggggttaatgcagatggcaagtgcaccaaggagaaggcaggaatgctggagcctggaataagggaggagaggggactggagagtgtggggaataggaagaagaaatttcctttagactaacgaatatattggggggaggaatagaggggaggtgtgcaggaaccagcaatgagaaggccaggaaaagaaagagctgaaaatgcagaaagccgaagagttagaacttttggatacagcagaagaaacagcggctccactaccgacctgcccccggttcgatgtccttccaagaatgaagtctttccctggtgatggtcccctgccctgtctttccagcatccactctgtcttgtcctcctggaagtgtatctcagtcagccagtggcttcttgatgatggcggtggaggtggtggttgtagtgtgatggatcccctttaggttatttaggggtatatgtcccctgcttgaaccctgaaggccaggtaatgagccatggccattgtccccagctgaggaccaggtgtctctaaaaacccaaacatcctggagagtatgcgagaacctaccaagaaaaacagtctcattactcatatacagcaggcaaagagacagaaaattaactgaaaagcagtttagagactgggggaggccggatctctagagccatcctgctgagtgccctgtgtgtaagtcctaataaactcacctactcaccaagctggacttattcgagtcattccttggtctcctggctcctttctcgctttgggagcaagttcctgtctgaagtttttgtctgaacagtggtaaaggtgatggtgatgatgtcagcagacagcaggaggacttgacaaatgtcagccctgcttggggccaggatacactgagggaacgatgacattccaatgaaactccaaattctgtattggaaaagtcattgatttgt

SEQ ID NO: 10394 - protein, 202 aa, Homo sapiens; identical to SEQ ID NO: 1317

SEQ ID NO: 10395 - DNA, 2320 bp, Homo sapiens
gatttcagccaggctgtgccacggagggcagaggccacccaggtcagtcataggggatgcagctgggaacaccgcagggtccctgccggatgctcagagtttaacggggagacagaggcccaaagagccacacagagggttaagaaaaaaaacgaacccttccagtcaggtcagtgactggagagctccatggaaagtctctcagtgacctggctgctggcaccatggactcagaaaagaaacgctttactgaagaggccaccaaatacttccgggagagagtcagcccagtgcatctgcaaatcctgctgactaacaatgaagcctggaagagattcgtgactgcggctgaattgcccagggatgaggcagatgctctctacgaagctctgaagaagcttagaacatatgcagctattgaggacgaatatgtgcagcagaaagatgagcagtttagggaatggtttttgaaagagtttccccaagtcaagaggaagatccaggagtccatagaaaagcttcgtgcccttgcaaatggtattgaagaggtccacagaggctgcaccatctccaatgtggtgtccagctccactggcgctgcctctggcatcatgtcccttgctggtcttgttttggcaccatttacagcagggacgagtctggcccttactgcagctggggtagggctgggagcagcgtctgctgtgactgggatcaccaccagcatcgtggagcactcatacacatcatcagcagaagctgaagccagcaggctgactgcaaccagcattgaccgattgaaggtatttaaggaagttatgcgtgacatcacacccaacttactttcccttcttaataattattacgaagccacacaaaccattgggagtgaaatccgtgccatcaggcaagccagagccagggcccgactccctgtgaccacctggcgaatctcagctggaagtggtggtcaagcagagagaacgattgcaggcaccacccgggcagtgagcagaggagcccggatcctgagtgcgaccacttcaggcatcttccttgcactggatgtggtcaaccttgtatacgagtcaaagcacttgcatgagggggcaaagtctgcatctgctgaggagctgaggcggcaggctcaggagctggaggagaatctaatggagctcactcagatctatcagcgtctgaatccatgccatacccactgaccccagaccagtgcagccagcaggggaggtgagccatacacaggccacgacaaaatgcaggcattttattagggggataaagagggcaaggtaaagtttatggagctgagtgttagtgactttggcatttctgtagctgagcacagcaggggaggggttaatgcagatggcaagtgcaccaaggagaaggcaggaatgctggagcctggaataagggaggagaggggactggagagtgtggggaataggaagaagaaatttcctttagactaacgaatatattggggggaggaatagaggggaggtgtgcaggaaccagcaatgagaaggccaggaaaagaaagagctgaaaatgcagaaagccgaagagttagaacttttggatacagcagaagaaacagcggctccactaccgacctgcccccggttcgatgtccttccaagaatgaagtctttccctggtgatggtcccctgccctgtctttccagcatccactctgtcttgtcctcctggaagtgtatctcagtcagccagtggcttcttgatgatggcggtggaggtggtggttgtagtgtgatggatcccctttaggttatttaggggtatatgtcccctgcttgaaccctgaaggccaggtaatgagccatggccattgtccccagctgaggaccaggtgtctctaaaaacccaaacatcctggagagtatgcgagaacctaccaagaaaaacagtctcattactcatatacagcaggcaaagagacagaaaattaactgaaaagcagtttagagactgggggaggccggatctctagagccatcctgctgagtgccctgtgtgtaagtcctaataaactcacctactcaccaagctggacttattcgagtcattccttggtctcctggctcctttctcgctttgggagcaagttcctgtctgaagtttttgtctgaacagtggtaaaggtgatggtgatgatgtcagcagacagcaggaggacttgacaaatgtcagccctgcttggggccaggatacactgagggaacgatgacattccaatgaaactccaaattctgtattggaaaagtcattgatttgt

SEQ ID NO: 10396 - protein, 331 aa, Homo sapiens; identical to SEQ ID NO: 1309

SEQ ID NO: 10397 - DNA, 2179 bp, Homo sapiens
gttgtccagaggctggttgcttttagtccaagtgctgcctcccacacctcggatttcagccaggctgtgccacggagggcagaggccacccagaaaagaaacgctttactgaagaggccaccaaatacttccgggagagagtcagcccagtgcatctgcaaatcctgctgactaacaatgaagcctggaagagattcgtgactgcggctgaattgcccagggatgaggcagatgctctctacgaagctctgaagaagcttagaacatatgcagctattgaggacgaatatgtgcagcagaaagatgagcagtttagggaatggtttttgaaagagtttccccaagtcaagaggaagatccaggagtccatagaaaagcttcgtgcccttgcaaatggtattgaagaggtccacagaggctgcaccatctccaatgtggtgtccagctccactggcgctgcctctggcatcatgtcccttgctggtcttgttttggcaccatttacagcagggacgagtctggcccttactgcagctggggtagggctgggagcagcgtctgctgtgactgggatcaccaccagcatcgtggagcactcatacacatcatcagcagaagctgaagccagcaggctgactgcaaccagcattgaccgattgaaggtatttaaggaagttatgcgtgacatcacacccaacttactttcccttcttaataattattacgaagccacacaaaccattgggagtgaaatccgtgccatcaggcaagccagagccagggcccgactccctgtgaccacctggcgaatctcagctggaagtggtggtcaagcagagagaacgattgcaggcaccacccgggcagtgagcagaggagcccggatcctgagtgcgaccacttcaggcatcttccttgcactggatgtggtcaaccttgtatacgagtcaaagcacttgcatgagggggcaaagtctgcatctgctgaggagctgaggcggcaggctcaggagctggaggagaatctaatggagctcactcagatctatcagcgtctgaatccatgccatacccactgaccccagaccagtgcagccagcaggggaggtgagccatacacaggccacgacaaaatgcaggcattttattagggggataaagagggcaaggtaaagtttatggagctgagtgttagtgactttggcatttctgtagctgagcacagcaggggaggggttaatgcagatggcaagtgcaccaaggagaaggcaggaatgctggagcctggaataagggaggagaggggactggagagtgtggggaataggaagaagaaatttcctttagactaacgaatatattggggggaggaatagaggggaggtgtgcaggaaccagcaatgagaaggccaggaaaagaaagagctgaaaatgcagaaagccgaagagttagaacttttggatacagcagaagaaacagcggctccactaccgacctgcccccggttcgatgtccttccaagaatgaagtctttccctggtgatggtcccctgccctgtctttccagcatccactctgtcttgtcctcctggaagtgtatctcagtcagccagtggcttcttgatgatggcggtggaggtggtggttgtagtgtgatggatcccctttaggttatttaggggtatatgtcccctgcttgaaccctgaaggccaggtaatgagccatggccattgtccccagctgaggaccaggtgtctctaaaaacccaaacatcctggagagtatgcgagaacctaccaagaaaaacagtctcattactcatatacagcaggcaaagagacagaaaattaactgaaaagcagtttagagactgggggaggccggatctctagagccatcctgctgagtgccctgtgtgtaagtcctaataaactcacctactcaccaagctggacttattcgagtcattccttggtctcctggctcctttctcgctttgggagcaagttcctgtctgaagtttttgtctgaacagtggtaaaggtgatggtgatgatgtcagcagacagcaggaggacttgacaaatgtcagccctgcttggggccaggatacactgagggaacgatgacattccaatgaaactccaaattctgtattggaaaagtcattgatttgt

SEQ ID NO: 10398 - protein, 202 aa, Homo sapiens; identical to SEQ ID NO: 1317

SEQ ID NO: 10399 - DNA, 2332 bp, Homo sapiens
gaagctgggccatgttgtccagaggctggttgcttttagtccaagtgctgcctcccacacctcggatttcagccaggctgtgccacggagggcagaggccacccaggtggctcacattcagtcccacaatttgctttctcctcctcaagggttaagaaaaaaaacgaacccttccagtcaggtcagtgactggagagctccatggaaagtctctcagtgacctggctgctggcaccatggactcagaaaagaaacgctttactgaagaggccaccaaatacttccgggagagagtcagcccagtgcatctgcaaatcctgctgactaacaatgaagcctggaagagattcgtgactgcggctgaattgcccagggatgaggcagatgctctctacgaagctctgaagaagcttagaacatatgcagctattgaggacgaatatgtgcagcagaaagatgagcagtttagggaatggtttttgaaagagtttccccaagtcaagaggaagatccaggagtccatagaaaagcttcgtgcccttgcaaatggtattgaagaggtccacagaggctgcaccatctccaatgtggtgtccagctccactggcgctgcctctggcatcatgtcccttgctggtcttgttttggcaccatttacagcagggacgagtctggcccttactgcagctggggtagggctgggagcagcgtctgctgtgactgggatcaccaccagcatcgtggagcactcatacacatcatcagcagaagctgaagccagcaggctgactgcaaccagcattgaccgattgaaggtatttaaggaagttatgcgtgacatcacacccaacttactttcccttcttaataattattacgaagccacacaaaccattgggagtgaaatccgtgccatcaggcaagccagagccagggcccgactccctgtgaccacctggcgaatctcagctggaagtggtggtcaagcagagagaacgattgcaggcaccacccgggcagtgagcagaggagcccggatcctgagtgcgaccacttcaggcatcttccttgcactggatgtggtcaaccttgtatacgagtcaaagcacttgcatgagggggcaaagtctgcatctgctgaggagctgaggcggcaggctcaggagctggaggagaatctaatggagctcactcagatctatcagcgtctgaatccatgccatacccactgaccccagaccagtgcagccagcaggggaggtgagccatacacaggccacgacaaaatgcaggcattttattagggggataaagagggcaaggtaaagtttatggagctgagtgttagtgactttggcatttctgtagctgagcacagcaggggaggggttaatgcagatggcaagtgcaccaaggagaaggcaggaatgctggagcctggaataagggaggagaggggactggagagtgtggggaataggaagaagaaatttcctttagactaacgaatatattggggggaggaatagaggggaggtgtgcaggaaccagcaatgagaaggccaggaaaagaaagagctgaaaatgcagaaagccgaagagttagaacttttggatacagcagaagaaacagcggctccactaccgacctgcccccggttcgatgtccttccaagaatgaagtctttccctggtgatggtcccctgccctgtctttccagcatccactctgtcttgtcctcctggaagtgtatctcagtcagccagtggcttcttgatgatggcggtggaggtggtggttgtagtgtgatggatcccctttaggttatttaggggtatatgtcccctgcttgaaccctgaaggccaggtaatgagccatggccattgtccccagctgaggaccaggtgtctctaaaaacccaaacatcctggagagtatgcgagaacctaccaagaaaaacagtctcattactcatatacagcaggcaaagagacagaaaattaactgaaaagcagtttagagactgggggaggccggatctctagagccatcctgctgagtgccctgtgtgtaagtcctaataaactcacctactcaccaagctggacttattcgagtcattccttggtctcctggctcctttctcgctttgggagcaagttcctgtctgaagtttttgtctgaacagtggtaaaggtgatggtgatgatgtcagcagacagcaggaggacttgacaaatgtcagccctgcttggggccaggatacactgagggaacgatgacattccaatgaaactccaaattctgtattggaaaagtcattgatttgt

SEQ ID NO: 10400 - protein, 331 aa, Homo sapiens; identical to SEQ ID NO: 1309

SEQ ID NO: 10401 - DNA, 2295 bp, Homo sapiens
gaaactgaagctgggccatgttgtccagaggctggttgcttttagtccaagtgctgcctcccacacctcggatttcagccaggctgtgccacggagggcagaggccacccagggttaagaaaaaaaacgaacccttccagtcaggtcagtgactggagagctccatggaaagtctctcagtgacctggctgctggcaccatggactcagaaaagaaacgctttactgaagaggccaccaaatacttccgggagagagtcagcccagtgcatctgcaaatcctgctgactaacaatgaagcctggaagagattcgtgactgcggctgaattgcccagggatgaggcagatgctctctacgaagctctgaagaagcttagaacatatgcagctattgaggacgaatatgtgcagcagaaagatgagcagtttagggaatggtttttgaaagagtttccccaagtcaagaggaagatccaggagtccatagaaaagcttcgtgcccttgcaaatggtattgaagaggtccacagaggctgcaccatctccaatgtggtgtccagctccactggcgctgcctctggcatcatgtcccttgctggtcttgttttggcaccatttacagcagggacgagtctggcccttactgcagctggggtagggctgggagcagcgtctgctgtgactgggatcaccaccagcatcgtggagcactcatacacatcatcagcagaagctgaagccagcaggctgactgcaaccagcattgaccgattgaaggtatttaaggaagttatgcgtgacatcacacccaacttactttcccttcttaataattattacgaagccacacaaaccattgggagtgaaatccgtgccatcaggcaagccagagccagggcccgactccctgtgaccacctggcgaatctcagctggaagtggtggtcaagcagagagaacgattgcaggcaccacccgggcagtgagcagaggagcccggatcctgagtgcgaccacttcaggcatcttccttgcactggatgtggtcaaccttgtatacgagtcaaagcacttgcatgagggggcaaagtctgcatctgctgaggagctgaggcggcaggctcaggagctggaggagaatctaatggagctcactcagatctatcagcgtctgaatccatgccatacccactgaccccagaccagtgcagccagcaggggaggtgagccatacacaggccacgacaaaatgcaggcattttattagggggataaagagggcaaggtaaagtttatggagctgagtgttagtgactttggcatttctgtagctgagcacagcaggggaggggttaatgcagatggcaagtgcaccaaggagaaggcaggaatgctggagcctggaataagggaggagaggggactggagagtgtggggaataggaagaagaaatttcctttagactaacgaatatattggggggaggaatagaggggaggtgtgcaggaaccagcaatgagaaggccaggaaaagaaagagctgaaaatgcagaaagccgaagagttagaacttttggatacagcagaagaaacagcggctccactaccgacctgcccccggttcgatgtccttccaagaatgaagtctttccctggtgatggtcccctgccctgtctttccagcatccactctgtcttgtcctcctggaagtgtatctcagtcagccagtggcttcttgatgatggcggtggaggtggtggttgtagtgtgatggatcccctttaggttatttaggggtatatgtcccctgcttgaaccctgaaggccaggtaatgagccatggccattgtccccagctgaggaccaggtgtctctaaaaacccaaacatcctggagagtatgcgagaacctaccaagaaaaacagtctcattactcatatacagcaggcaaagagacagaaaattaactgaaaagcagtttagagactgggggaggccggatctctagagccatcctgctgagtgccctgtgtgtaagtcctaataaactcacctactcaccaagctggacttattcgagtcattccttggtctcctggctcctttctcgctttgggagcaagttcctgtctgaagtttttgtctgaacagtggtaaaggtgatggtgatgatgtcagcagacagcaggaggacttgacaaatgtcagccctgcttggggccaggatacactgagggaacgatgacattccaatgaaactccaaattctgtattggaaaagtcattgatttgt

SEQ ID NO: 10402 - protein, 331 aa, Homo sapiens; identical to SEQ ID NO: 1309

SEQ ID NO: 10403 - DNA, 2192 bp, Homo sapiens
ttatgcagatgcacggctggaggtgggatccacacagctcagaacagctggatcttgctcacactctttcaagagaagcttccttgggttaagaaaaaaaacgaacccttccagtcaggtcagtgactggagagctccatggaaagtctctcagtgacctggctgctggcaccatggactcagaaaagaaacgctttactgaagagattcgtgactgcggctgaattgcccagggatgaggcagatgctctctacgaagctctgaagaagcttagaacatatgcagctattgaggacgaatatgtgcagcagaaagatgagcagtttagggaatggtttttgaaagagtttccccaagtcaagaggaagatccaggagtccatagaaaagcttcgtgcccttgcaaatggtattgaagaggtccacagaggctgcaccatctccaatgtggtgtccagctccactggcgctgcctctggcatcatgtcccttgctggtcttgttttggcaccatttacagcagggacgagtctggcccttactgcagctggggtagggctgggagcagcgtctgctgtgactgggatcaccaccagcatcgtggagcactcatacacatcatcagcagaagctgaagccagcaggctgactgcaaccagcattgaccgattgaaggtatttaaggaagttatgcgtgacatcacacccaacttactttcccttcttaataattattacgaagccacacaaaccattgggagtgaaatccgtgccatcaggcaagccagagccagggcccgactccctgtgaccacctggcgaatctcagctggaagtggtggtcaagcagagagaacgattgcaggcaccacccgggcagtgagcagaggagcccggatcctgagtgcgaccacttcaggcatcttccttgcactggatgtggtcaaccttgtatacgagtcaaagcacttgcatgagggggcaaagtctgcatctgctgaggagctgaggcggcaggctcaggagctggaggagaatctaatggagctcactcagatctatcagcgtctgaatccatgccatacccactgaccccagaccagtgcagccagcaggggaggtgagccatacacaggccacgacaaaatgcaggcattttattagggggataaagagggcaaggtaaagtttatggagctgagtgttagtgactttggcatttctgtagctgagcacagcaggggaggggttaatgcagatggcaagtgcaccaaggagaaggcaggaatgctggagcctggaataagggaggagaggggactggagagtgtggggaataggaagaagaaatttcctttagactaacgaatatattggggggaggaatagaggggaggtgtgcaggaaccagcaatgagaaggccaggaaaagaaagagctgaaaatgcagaaagccgaagagttagaacttttggatacagcagaagaaacagcggctccactaccgacctgcccccggttcgatgtccttccaagaatgaagtctttccctggtgatggtcccctgccctgtctttccagcatccactctgtcttgtcctcctggaagtgtatctcagtcagccagtggcttcttgatgatggcggtggaggtggtggttgtagtgtgatggatcccctttaggttatttaggggtatatgtcccctgcttgaaccctgaaggccaggtaatgagccatggccattgtccccagctgaggaccaggtgtctctaaaaacccaaacatcctggagagtatgcgagaacctaccaagaaaaacagtctcattactcatatacagcaggcaaagagacagaaaattaactgaaaagcagtttagagactgggggaggccggatctctagagccatcctgctgagtgccctgtgtgtaagtcctaataaactcacctactcaccaagctggacttattcgagtcattccttggtctcctggctcctttctcgctttgggagcaagttcctgtctgaagtttttgtctgaacagtggtaaaggtgatggtgatgatgtcagcagacagcaggaggacttgacaaatgtcagccctgcttggggccaggatacactgagggaacgatgacattccaatgaaactccaaattctgtattggaaaagtcattgatttgt

SEQ ID NO: 10404 - protein, 317 aa, Homo sapiens
MESLSVTWLLAPWTQKRNALLKRFVTAAELPRDEADALYEALKKLRTYAAIEDEYVQQKDEQFREWFLKEFPQVKRKIQESIEKLRALANGIEEVHRGCTISNVVSSSTGAASGIMSLAGLVLAPFTAGTSLALTAAGVGLGAASAVTGITTSIVEHSYTSSAEAEASRLTATSIDRLKVFKEVMRDITPNLLSLLNNYYEATQTIGSEIRAIRQARARARLPVTTWRISAGSGGQAERTIAGTTRAVSRGARILSATTSGIFLALDVVNLVYESKHLHEGAKSASAEELRRQAQELEENLMELTQIYQRLNPCHTH

SEQ ID NO: 10405 - DNA, 2313 bp, Homo sapiens
attatgcagatgcacggctggaggtgggatccacacagctcagaacagctggatcttgctcacactctttcaagagaagcttccttggtggctcacattcagtcccacaatttgctttctcctcctcaagggttaagaaaaaaaacgaacccttccagtcaggtcagtgactggagagctccatggaaagtctctcagtgacctggctgctggcaccatggactcagaaaagaaacgctttactgaagaggccaccaaatacttccgggagagagtcagcccagtgcatctgcaaatcctgctgactaacaatgaagcctggaagagattcgtgactgcggctgaattgcccagggatgaggcagatgctctctacgaagctctgaagaagcttagaacatatgcagctattgaggacgaatatgtgcagcagaaagatgagcagtttagggaatggtttttgaaagagtttccccaagtcaagaggaagatccaggagtccatagaaaagcttcgtgcccttgcaaatggtattgaagaggtccacagaggctgcaccatctccaatgtggtgtccagctccactggcgctgcctctggcatcatgtcccttgctggtcttgttttggcaccatttacagcagggacgagtctggcccttactgcagctggggtagggctgggagcagcgtctgctgtgactgggatcaccaccagcatcgtggagcactcatacacatcatcagcagaagctgaagccagcaggctgactgcaaccagcattgaccgattgaaggtatttaaggaagttatgcgtgacatcacacccaacttactttcccttcttaataattattacgaagccacacaaaccattgggagtgaaatccgtgccatcaggcaagccagagccagggcccgactccctgtgaccacctggcgaatctcagctggaagtggtggtcaagcagagagaacgattgcaggcaccacccgggcagtgagcagaggagcccggatcctgagtgcgaccacttcaggcatcttccttgcactggatgtggtcaaccttgtatacgagtcaaagcacttgcatgagggggcaaagtctgcatctgctgaggagctgaggcggcaggctcaggagctggaggagaatctaatggagctcactcagatctatcagcgtctgaatccatgccatacccactgaccccagaccagtgcagccagcaggggaggtgagccatacacaggccacgacaaaatgcaggcattttattagggggataaagagggcaaggtaaagtttatggagctgagtgttagtgactttggcatttctgtagctgagcacagcaggggaggggttaatgcagatggcaagtgcaccaaggagaaggcaggaatgctggagcctggaataagggaggagaggggactggagagtgtggggaataggaagaagaaatttcctttagactaacgaatatattggggggaggaatagaggggaggtgtgcaggaaccagcaatgagaaggccaggaaaagaaagagctgaaaatgcagaaagccgaagagttagaacttttggatacagcagaagaaacagcggctccactaccgacctgcccccggttcgatgtccttccaagaatgaagtctttccctggtgatggtcccctgccctgtctttccagcatccactctgtcttgtcctcctggaagtgtatctcagtcagccagtggcttcttgatgatggcggtggaggtggtggttgtagtgtgatggatcccctttaggttatttaggggtatatgtcccctgcttgaaccctgaaggccaggtaatgagccatggccattgtccccagctgaggaccaggtgtctctaaaaacccaaacatcctggagagtatgcgagaacctaccaagaaaaacagtctcattactcatatacagcaggcaaagagacagaaaattaactgaaaagcagtttagagactgggggaggccggatctctagagccatcctgctgagtgccctgtgtgtaagtcctaataaactcacctactcaccaagctggacttattcgagtcattccttggtctcctggctcctttctcgctttgggagcaagttcctgtctgaagtttttgtctgaacagtggtaaaggtgatggtgatgatgtcagcagacagcaggaggacttgacaaatgtcagccctgcttggggccaggatacactgagggaacgatgacattccaatgaaactccaaattctgtattggaaaagtcattgatttgt

SEQ ID NO: 10406 - protein, 331 aa, Homo sapiens; identical to SEQ ID NO: 1309

SEQ ID NO: 10407 - DNA, 2086 bp, Homo sapiens
attatgcagatgcacggctggaggtgggatccacacagctcagaacagctggatcttgctcacactctttcaagagaagcttccttgaaaagaaacgctttactgaagaggccaccaaatacttcagggatgaggcagatgctctctacgaagctctgaagaagcttagaacatatgcagctattgaggacgaatatgtgcagcagaaagatgagcagtttagggaatggtttttgaaagagtttccccaagtcaagaggaagatccaggagtccatagaaaagcttcgtgcccttgcaaatggtattgaagaggtccacagaggctgcaccatctccaatgtggtgtccagctccactggcgctgcctctggcatcatgtcccttgctggtcttgttttggcaccatttacagcagggacgagtctggcccttactgcagctggggtagggctgggagcagcgtctgctgtgactgggatcaccaccagcatcgtggagcactcatacacatcatcagcagaagctgaagccagcaggctgactgcaaccagcattgaccgattgaaggtatttaaggaagttatgcgtgacatcacacccaacttactttcccttcttaataattattacgaagccacacaaaccattgggagtgaaatccgtgccatcaggcaagccagagccagggcccgactccctgtgaccacctggcgaatctcagctggaagtggtggtcaagcagagagaacgattgcaggcaccacccgggcagtgagcagaggagcccggatcctgagtgcgaccacttcaggcatcttccttgcactggatgtggtcaaccttgtatacgagtcaaagcacttgcatgagggggcaaagtctgcatctgctgaggagctgaggcggcaggctcaggagctggaggagaatctaatggagctcactcagatctatcagcgtctgaatccatgccatacccactgaccccagaccagtgcagccagcaggggaggtgagccatacacaggccacgacaaaatgcaggcattttattagggggataaagagggcaaggtaaagtttatggagctgagtgttagtgactttggcatttctgtagctgagcacagcaggggaggggttaatgcagatggcaagtgcaccaaggagaaggcaggaatgctggagcctggaataagggaggagaggggactggagagtgtggggaataggaagaagaaatttcctttagactaacgaatatattggggggaggaatagaggggaggtgtgcaggaaccagcaatgagaaggccaggaaaagaaagagctgaaaatgcagaaagccgaagagttagaacttttggatacagcagaagaaacagcggctccactaccgacctgcccccggttcgatgtccttccaagaatgaagtctttccctggtgatggtcccctgccctgtctttccagcatccactctgtcttgtcctcctggaagtgtatctcagtcagccagtggcttcttgatgatggcggtggaggtggtggttgtagtgtgatggatcccctttaggttatttaggggtatatgtcccctgcttgaaccctgaaggccaggtaatgagccatggccattgtccccagctgaggaccaggtgtctctaaaaacccaaacatcctggagagtatgcgagaacctaccaagaaaaacagtctcattactcatatacagcaggcaaagagacagaaaattaactgaaaagcagtttagagactgggggaggccggatctctagagccatcctgctgagtgccctgtgtgtaagtcctaataaactcacctactcaccaagctggacttattcgagtcattccttggtctcctggctcctttctcgctttgggagcaagttcctgtctgaagtttttgtctgaacagtggtaaaggtgatggtgatgatgtcagcagacagcaggaggacttgacaaatgtcagccctgcttggggccaggatacactgagggaacgatgacattccaatgaaactccaaattctgtattggaaaagtcattgatttgt

SEQ ID NO: 10408 - protein, 51 aa, Homo sapiens
MQMHGWRWDPHSSEQLDLAHTLSREASLKRNALLKRPPNTSGMRQMLSTKL

SEQ ID NO: 10409 - DNA, 2293 bp, Homo sapiens
attatgcagatgcacggctggaggtgggatccacacagctcagaacagctggatcttgctcacactctttcaagagaagcttccttggacaaaaggaccctgccttggtgtgagagtgagggcagagggagctggagcaagtagaatttctctaaataccagctggctggggcccaggagattaaaaaacaccgggctaggttggtcttggcatttgctgacacgcaaagggattgcagagatccagcccctccaacctccctctgtccacaggtggctcacattcagtcccacaatttgctttctcctcctcaagggttaagaaaaaaaacgaacccttccagtcaggtcagtgactggagagctccatggaaagtctctcagtgacctggctgctggcaccatggactcagaaagatgagcagtttagggaatggtttttgaaagagtttccccaagtcaagaggaagatccaggagtccatagaaaagcttcgtgcccttgcaaatggtattgaagaggtccacagaggctgcaccatctccaatgtggtgtccagctccactggcgctgcctctggcatcatgtcccttgctggtcttgttttggcaccatttacagcagggacgagtctggcccttactgcagctggggtagggctgggagcagcgtctgctgtgactgggatcaccaccagcatcgtggagcactcatacacatcatcagcagaagctgaagccagcaggctgactgcaaccagcattgaccgattgaaggtatttaaggaagttatgcgtgacatcacacccaacttactttcccttcttaataattattacgaagccacacaaaccattgggagtgaaatccgtgccatcaggcaagccagagccagggcccgactccctgtgaccacctggcgaatctcagctggaagtggtggtcaagcagagagaacgattgcaggcaccacccgggcagtgagcagaggagcccggatcctgagtgcgaccacttcaggcatcttccttgcactggatgtggtcaaccttgtatacgagtcaaagcacttgcatgagggggcaaagtctgcatctgctgaggagctgaggcggcaggctcaggagctggaggagaatctaatggagctcactcagatctatcagcgtctgaatccatgccatacccactgaccccagaccagtgcagccagcaggggaggtgagccatacacaggccacgacaaaatgcaggcattttattagggggataaagagggcaaggtaaagtttatggagctgagtgttagtgactttggcatttctgtagctgagcacagcaggggaggggttaatgcagatggcaagtgcaccaaggagaaggcaggaatgctggagcctggaataagggaggagaggggactggagagtgtggggaataggaagaagaaatttcctttagactaacgaatatattggggggaggaatagaggggaggtgtgcaggaaccagcaatgagaaggccaggaaaagaaagagctgaaaatgcagaaagccgaagagttagaacttttggatacagcagaagaaacagcggctccactaccgacctgcccccggttcgatgtccttccaagaatgaagtctttccctggtgatggtcccctgccctgtctttccagcatccactctgtcttgtcctcctggaagtgtatctcagtcagccagtggcttcttgatgatggcggtggaggtggtggttgtagtgtgatggatcccctttaggttatttaggggtatatgtcccctgcttgaaccctgaaggccaggtaatgagccatggccattgtccccagctgaggaccaggtgtctctaaaaacccaaacatcctggagagtatgcgagaacctaccaagaaaaacagtctcattactcatatacagcaggcaaagagacagaaaattaactgaaaagcagtttagagactgggggaggccggatctctagagccatcctgctgagtgccctgtgtgtaagtcctaataaactcacctactcaccaagctggacttattcgagtcattccttggtctcctggctcctttctcgctttgggagcaagttcctgtctgaagtttttgtctgaacagtggtaaaggtgatggtgatgatgtcagcagacagcaggaggacttgacaaatgtcagccctgcttggggccaggatacactgagggaacgatgacattccaatgaaactccaaattctgtattggaaaagtcattgatttgt

SEQ ID NO: 10410 - protein, 274 aa, Homo sapiens
MESLSVTWLLAPWTQKDEQFREWFLKEFPQVKRKIQESIEKLRALANGIEEVHRGCTISNVVSSSTGAASGIMSLAGLVLAPFTAGTSLALTAAGVGLGAASAVTGITTSIVEHSYTSSAEAEASRLTATSIDRLKVFKEVMRDITPNLLSLLNNYYEATQTIGSEIRAIRQARARARLPVTTWRISAGSGGQAERTIAGTTRAVSRGARILSATTSGIFLALDVVNLVYESKHLHEGAKSASAEELRRQAQELEENLMELTQIYQRLNPCHTH

SEQ ID NO: 10411 - DNA, 2433 bp, Homo sapiens
attatgcagatgcacggctggaggtgggatccacacagctcagaacagctggatcttgctcacactctttcaagagaagcttccttgagatgagcatctagatagcaaggaaaaacattcaatccctcaactgaaagtgaaactgaagctgggccatgttgtccagaggctggttgcttttagtccaagtgctgcctcccacacctcggatttcagccaggctgtgccacggagggcagaggccacccagggttaagaaaaaaaacgaacccttccagtcaggtcagtgactggagagctccatggaaagtctctcagtgacctggctgctggcaccatggactcagaaaagaaacgctttactgaagaggccaccaaatacttccgggagagagtcagcccagtgcatctgcaaatcctgctgactaacaatgaagcctggaagagattcgtgactgcggctgaattgcccagggatgaggcagatgctctctacgaagctctgaagaagcttagaacatatgcagctattgaggacgaatatgtgcagcagaaagatgagcagtttagggaatggtttttgaaagagtttccccaagtcaagaggaagatccaggagtccatagaaaagcttcgtgcccttgcaaatggtattgaagaggtccacagaggctgcaccatctccaatgtggtgtccagctccactggcgctgcctctggcatcatgtcccttgctggtcttgttttggcaccatttacagcagggacgagtctggcccttactgcagctggggtagggctgggagcagcgtctgctgtgactgggatcaccaccagcatcgtggagcactcatacacatcatcagcagaagctgaagccagcaggctgactgcaaccagcattgaccgattgaaggtatttaaggaagttatgcgtgacatcacacccaacttactttcccttcttaataattattacgaagccacacaaaccattgggagtgaaatccgtgccatcaggcaagccagagccagggcccgactccctgtgaccacctggcgaatctcagctggaagtggtggtcaagcagagagaacgattgcaggcaccacccgggcagtgagcagaggagcccggatcctgagtgcgaccacttcaggcatcttccttgcactggatgtggtcaaccttgtatacgagtcaaagcacttgcatgagggggcaaagtctgcatctgctgaggagctgaggcggcaggctcaggagctggaggagaatctaatggagctcactcagatctatcagcgtctgaatccatgccatacccactgaccccagaccagtgcagccagcaggggaggtgagccatacacaggccacgacaaaatgcaggcattttattagggggataaagagggcaaggtaaagtttatggagctgagtgttagtgactttggcatttctgtagctgagcacagcaggggaggggttaatgcagatggcaagtgcaccaaggagaaggcaggaatgctggagcctggaataagggaggagaggggactggagagtgtggggaataggaagaagaaatttcctttagactaacgaatatattggggggaggaatagaggggaggtgtgcaggaaccagcaatgagaaggccaggaaaagaaagagctgaaaatgcagaaagccgaagagttagaacttttggatacagcagaagaaacagcggctccactaccgacctgcccccggttcgatgtccttccaagaatgaagtctttccctggtgatggtcccctgccctgtctttccagcatccactctgtcttgtcctcctggaagtgtatctcagtcagccagtggcttcttgatgatggcggtggaggtggtggttgtagtgtgatggatcccctttaggttatttaggggtatatgtcccctgcttgaaccctgaaggccaggtaatgagccatggccattgtccccagctgaggaccaggtgtctctaaaaacccaaacatcctggagagtatgcgagaacctaccaagaaaaacagtctcattactcatatacagcaggcaaagagacagaaaattaactgaaaagcagtttagagactgggggaggccggatctctagagccatcctgctgagtgccctgtgtgtaagtcctaataaactcacctactcaccaagctggacttattcgagtcattccttggtctcctggctcctttctcgctttgggagcaagttcctgtctgaagtttttgtctgaacagtggtaaaggtgatggtgatgatgtcagcagacagcaggaggacttgacaaatgtcagccctgcttggggccaggatacactgagggaacgatgacattccaatgaaactccaaattctgtattggaaaagtcattgatttgt

SEQ ID NO: 10412 - protein, 331 aa, Homo sapiens; identical to SEQ ID NO: 1309

SEQ ID NO: 10413 - DNA, 2101 bp, Homo sapiens
actttcccttttgggttccagggtatatctcagagcctggagaacgtgtctggttattatgcagatgcacggctggaggtgggatccacacagctcagaacagctggatcttgctcacactctttcaagagaagcttccttgggatgaggcagatgctctctacgaagctctgaagaagcttagaacatatgcagctattgaggacgaatatgtgcagcagaaagatgagcagtttagggaatggtttttgaaagagtttccccaagtcaagaggaagatccaggagtccatagaaaagcttcgtgcccttgcaaatggtattgaagaggtccacagaggctgcaccatctccaatgtggtgtccagctccactggcgctgcctctggcatcatgtcccttgctggtcttgttttggcaccatttacagcagggacgagtctggcccttactgcagctggggtagggctgggagcagcgtctgctgtgactgggatcaccaccagcatcgtggagcactcatacacatcatcagcagaagctgaagccagcaggctgactgcaaccagcattgaccgattgaaggtatttaaggaagttatgcgtgacatcacacccaacttactttcccttcttaataattattacgaagccacacaaaccattgggagtgaaatccgtgccatcaggcaagccagagccagggcccgactccctgtgaccacctggcgaatctcagctggaagtggtggtcaagcagagagaacgattgcaggcaccacccgggcagtgagcagaggagcccggatcctgagtgcgaccacttcaggcatcttccttgcactggatgtggtcaaccttgtatacgagtcaaagcacttgcatgagggggcaaagtctgcatctgctgaggagctgaggcggcaggctcaggagctggaggagaatctaatggagctcactcagatctatcagcgtctgaatccatgccatacccactgaccccagaccagtgcagccagcaggggaggtgagccatacacaggccacgacaaaatgcaggcattttattagggggataaagagggcaaggtaaagtttatggagctgagtgttagtgactttggcatttctgtagctgagcacagcaggggaggggttaatgcagatggcaagtgcaccaaggagaaggcaggaatgctggagcctggaataagggaggagaggggactggagagtgtggggaataggaagaagaaatttcctttagactaacgaatatattggggggaggaatagaggggaggtgtgcaggaaccagcaatgagaaggccaggaaaagaaagagctgaaaatgcagaaagccgaagagttagaacttttggatacagcagaagaaacagcggctccactaccgacctgcccccggttcgatgtccttccaagaatgaagtctttccctggtgatggtcccctgccctgtctttccagcatccactctgtcttgtcctcctggaagtgtatctcagtcagccagtggcttcttgatgatggcggtggaggtggtggttgtagtgtgatggatcccctttaggttatttaggggtatatgtcccctgcttgaaccctgaaggccaggtaatgagccatggccattgtccccagctgaggaccaggtgtctctaaaaacccaaacatcctggagagtatgcgagaacctaccaagaaaaacagtctcattactcatatacagcaggcaaagagacagaaaattaactgaaaagcagtttagagactgggggaggccggatctctagagccatcctgctgagtgccctgtgtgtaagtcctaataaactcacctactcaccaagctggacttattcgagtcattccttggtctcctggctcctttctcgctttgggagcaagttcctgtctgaagtttttgtctgaacagtggtaaaggtgatggtgatgatgtcagcagacagcaggaggacttgacaaatgtcagccctgcttggggccaggatacactgagggaacgatgacattccaatgaaactccaaattctgtattggaaaagtcattgatttgt

SEQ ID NO: 10414 - protein, 202 aa, Homo sapiens; identical to SEQ ID NO: 1317

SEQ ID NO: 10415 - DNA, 2193 bp, Homo sapiens
actttcactttcccttttgggttccagggtatatctcagagcctggagaacgtgtctggttattatgcagatgcacggctggaggtgggatccacacagctcagaacagctggatcttgctcacactctttcaagagaagcttccttgggttaagaaaaaaaacgaacccttccagtcaggtcagtgactggagagctccatggaaagtctctcagtgacctggctgctggcaccatggactcagaaaagaaacgctttactgaagaggccaccaaatacttccgggagagagtcagcccagtgcatctgcaaatcctgctgactaacaatgaagcctggaagagattcgtgactgcggctgaattgcccagggatgaggcagatgctctctacgaagctctgaagaagcttagaacatatgcagctattgaggacgaatatgtgcagcagaaagatgagcagtttagggaatggtttttgaaagagtttccccaagtcaagaggaagatccaggagtccatagaaaagcttcgtgcccttactgcagctggggtagggctgggagcagcgtctgctgtgactgggatcaccaccagcatcgtggagcactcatacacatcatcagcagaagctgaagccagcaggctgactgcaaccagcattgaccgattgaaggtatttaaggaagttatgcgtgacatcacacccaacttactttcccttcttaataattattacgaagccacacaaaccattgggagtgaaatccgtgccatcaggcaagccagagccagggcccgactccctgtgaccacctggcgaatctcagctggaagtggtggtcaagcagagagaacgattgcaggcaccacccgggcagtgagcagaggagcccggatcctgagtgcgaccacttcaggcatcttccttgcactggatgtggtcaaccttgtatacgagtcaaagcacttgcatgagggggcaaagtctgcatctgctgaggagctgaggcggcaggctcaggagctggaggagaatctaatggagctcactcagatctatcagcgtctgaatccatgccatacccactgaccccagaccagtgcagccagcaggggaggtgagccatacacaggccacgacaaaatgcaggcattttattagggggataaagagggcaaggtaaagtttatggagctgagtgttagtgactttggcatttctgtagctgagcacagcaggggaggggttaatgcagatggcaagtgcaccaaggagaaggcaggaatgctggagcctggaataagggaggagaggggactggagagtgtggggaataggaagaagaaatttcctttagactaacgaatatattggggggaggaatagaggggaggtgtgcaggaaccagcaatgagaaggccaggaaaagaaagagctgaaaatgcagaaagccgaagagttagaacttttggatacagcagaagaaacagcggctccactaccgacctgcccccggttcgatgtccttccaagaatgaagtctttccctggtgatggtcccctgccctgtctttccagcatccactctgtcttgtcctcctggaagtgtatctcagtcagccagtggcttcttgatgatggcggtggaggtggtggttgtagtgtgatggatcccctttaggttatttaggggtatatgtcccctgcttgaaccctgaaggccaggtaatgagccatggccattgtccccagctgaggaccaggtgtctctaaaaacccaaacatcctggagagtatgcgagaacctaccaagaaaaacagtctcattactcatatacagcaggcaaagagacagaaaattaactgaaaagcagtttagagactgggggaggccggatctctagagccatcctgctgagtgccctgtgtgtaagtcctaataaactcacctactcaccaagctggacttattcgagtcattccttggtctcctggctcctttctcgctttgggagcaagttcctgtctgaagtttttgtctgaacagtggtaaaggtgatggtgatgatgtcagcagacagcaggaggacttgacaaatgtcagccctgcttggggccaggatacactgagggaacgatgacattccaatgaaactccaaattctgtattggaaaagtcattgatttgt

SEQ ID NO: 10416 - protein, 285 aa, Homo sapiens
MDSEKKRFTEEATKYFRERVSPVHLQILLTNNEAWKRFVTAAELPRDEADALYEALKKLRTYAAIEDEYVQQKDEQFREWFLKEFPQVKRKIQESIEKLRALTAAGVGLGAASAVTGITTSIVEHSYTSSAEAEASRLTATSIDRLKVFKEVMRDITPNLLSLLNNYYEATQTIGSEIRAIRQARARARLPVTTWRISAGSGGQAERTIAGTTRAVSRGARILSATTSGIFLALDVVNLVYESKHLHEGAKSASAEELRRQAQELEENLMELTQIYQRLNPCHTH

SEQ ID NO: 10417 - DNA, 2246 bp, Homo sapiens
gtgactttcactttcccttttgggttccagggtatatctcagagcctggagaacgtgtctggttattatgcagatgcacggctggaggtgggatccacacagctcagaacagctggatcttgctcacactctttcaagagaagcttccttgggttaagaaaaaaaacgaacccttccagtcaggtcagtgactggagagctccatggaaagtctctcagtgacctggctgctggcaccatggactcagaaaagaaacgctttactgaagaggccaccaaatacttccgggagagagtcagcccagtgcatctgcaaatcctgctgactaacaatgaagcctggaagagattcgtgactgcggctgaattgcccagggatgaggcagatgctctctacgaagctctgaagaagcttagaacatatgcagctattgaggacgaatatgtgcagcagaaagatgagcagtttagggaatggtttttgaaagagtttccccaagtcaagaggaagatccaggagtccatagaaaagcttccatgtcccttgctggtcttgttttggcaccatttacagcagggacgagtctggcccttactgcagctggggtagggctgggagcagcgtctgctgtgactgggatcaccaccagcatcgtggagcactcatacacatcatcagcagaagctgaagccagcaggctgactgcaaccagcattgaccgattgaaggtatttaaggaagttatgcgtgacatcacacccaacttactttcccttcttaataattattacgaagccacacaaaccattgggagtgaaatccgtgccatcaggcaagccagagccagggcccgactccctgtgaccacctggcgaatctcagctggaagtggtggtcaagcagagagaacgattgcaggcaccacccgggcagtgagcagaggagcccggatcctgagtgcgaccacttcaggcatcttccttgcactggatgtggtcaaccttgtatacgagtcaaagcacttgcatgagggggcaaagtctgcatctgctgaggagctgaggcggcaggctcaggagctggaggagaatctaatggagctcactcagatctatcagcgtctgaatccatgccatacccactgaccccagaccagtgcagccagcaggggaggtgagccatacacaggccacgacaaaatgcaggcattttattagggggataaagagggcaaggtaaagtttatggagctgagtgttagtgactttggcatttctgtagctgagcacagcaggggaggggttaatgcagatggcaagtgcaccaaggagaaggcaggaatgctggagcctggaataagggaggagaggggactggagagtgtggggaataggaagaagaaatttcctttagactaacgaatatattggggggaggaatagaggggaggtgtgcaggaaccagcaatgagaaggccaggaaaagaaagagctgaaaatgcagaaagccgaagagttagaacttttggatacagcagaagaaacagcggctccactaccgacctgcccccggttcgatgtccttccaagaatgaagtctttccctggtgatggtcccctgccctgtctttccagcatccactctgtcttgtcctcctggaagtgtatctcagtcagccagtggcttcttgatgatggcggtggaggtggtggttgtagtgtgatggatcccctttaggttatttaggggtatatgtcccctgcttgaaccctgaaggccaggtaatgagccatggccattgtccccagctgaggaccaggtgtctctaaaaacccaaacatcctggagagtatgcgagaacctaccaagaaaaacagtctcattactcatatacagcaggcaaagagacagaaaattaactgaaaagcagtttagagactgggggaggccggatctctagagccatcctgctgagtgccctgtgtgtaagtcctaataaactcacctactcaccaagctggacttattcgagtcattccttggtctcctggctcctttctcgctttgggagcaagttcctgtctgaagtttttgtctgaacagtggtaaaggtgatggtgatgatgtcagcagacagcaggaggacttgacaaatgtcagccctgcttggggccaggatacactgagggaacgatgacattccaatgaaactccaaattctgtattggaaaagtcattgatttgt

SEQ ID NO: 10418 - protein, 223 aa, Homo sapiens
MVFERVSPSQEEDPGVHRKASMSLAGLVLAPFTAGTSLALTAAGVGLGAASAVTGITTSIVEHSYTSSAEAEASRLTATSIDRLKVFKEVMRDITPNLLSLLNNYYEATQTIGSEIRAIRQARARARLPVTTWRISAGSGGQAERTIAGTTRAVSRGARILSATTSGIFLALDVVNLVYESKHLHEGAKSASAEELRRQAQELEENLMELTQIYQRLNPCHTH

SEQ ID NO: 10419 - DNA, 2673 bp, Homo sapiens
agcaggagggtgggaccaagggtgctgctggaccaaggatgggactgggccaagggtggggctgggaagcatcctgttttgcatgtttgatcaggagctgctgccaagttgtgactttcactttcccttttgggttccagggtatatctcagagcctggagaacgtgtctggttattatgcagatgcacggctggaggtgggatccacacagctcagaacagctggatcttgctcacactctttcaagagaagcttccttggacaaaaggaccctgccttggtgtgagagtgagggcagagggagctggagcaagtagaatttctctaaataccagctggctggggcccaggagattaaaaaacaccgggctaggttggtcttggcatttgctgacacgcaaagggattgcagagatccagcccctccaacctccctctgtccacaggtggctcacattcagtcccacaatttgctttctcctcctcaagggttaagaaaaaaaacgaacccttccagtcaggtcagtgactggagagctccatggaaagtctctcagtgacctggctgctggcaccatggactcagaaaagaaacgctttactgaagaggccaccaaatacttccgggagagagtcagcccagtgcatctgcaaatcctgctgactaacaatgaagcctggaagagattcgtgactgcggctgaattgcccagggatgaggcagatgctctctacgaagctctgaagaagcttagaacatatgcagctattgaggacgaatatgtgcagcagaaagatgagcagtttagggaatggtttttgaaagagtttccccaagtcaagaggaagatccaggagtccatagaaaagcttcgtgcccttgcaaatggtattgaagaggtccacagaggctgcaccatctccaatgtggtgtccagctccactggcgctgcctctggcatcatgtcccttgctggtcttgttttggcaccatttacagcagggacgagtctggcccttactgcagctggggtagggctgggagcagcgtctgctgtgactgggatcaccaccagcatcgtggagcactcatacacatcatcagcagaagctgaagccagcaggctgactgcaaccagcattgaccgattgaaggtatttaaggaagttatgcgtgacatcacacccaacttactttcccttcttaataattattacgaagccacacaaaccattgggagtgaaatccgtgccatcaggcaagccagagccagggcccgactccctgtgaccacctggcgaatctcagctggaagtggtggtcaagcagagagaacgattgcaggcaccacccgggcagtgagcagaggagcccggatcctgagtgcgaccacttcaggcatcttccttgcactggatgtggtcaaccttgtatacgagtcaaagcacttgcatgagggggcaaagtctgcatctgctgaggagctgaggcggcaggctcaggagctggaggagaatctaatggagctcactcagatctatcagcgtctgaatccatgccatacccactgaccccagaccagtgcagccagcaggggaggtgagccatacacaggccacgacaaaatgcaggcattttattagggggataaagagggcaaggtaaagtttatggagctgagtgttagtgactttggcatttctgtagctgagcacagcaggggaggggttaatgcagatggcaagtgcaccaaggagaaggcaggaatgctggagcctggaataagggaggagaggggactggagagtgtggggaataggaagaagaaatttcctttagactaacgaatatattggggggaggaatagaggggaggtgtgcaggaaccagcaatgagaaggccaggaaaagaaagagctgaaaatgcagaaagccgaagagttagaacttttggatacagcagaagaaacagcggctccactaccgacctgcccccggttcgatgtccttccaagaatgaagtctttccctggtgatggtcccctgccctgtctttccagcatccactctgtcttgtcctcctggaagtgtatctcagtcagccagtggcttcttgatgatggcggtggaggtggtggttgtagtgtgatggatcccctttaggttatttaggggtatatgtcccctgcttgaaccctgaaggccaggtaatgagccatggccattgtccccagctgaggaccaggtgtctctaaaaacccaaacatcctggagagtatgcgagaacctaccaagaaaaacagtctcattactcatatacagcaggcaaagagacagaaaattaactgaaaagcagtttagagactgggggaggccggatctctagagccatcctgctgagtgccctgtgtgtaagtcctaataaactcacctactcaccaagctggacttattcgagtcattccttggtctcctggctcctttctcgctttgggagcaagttcctgtctgaagtttttgtctgaacagtggtaaaggtgatggtgatgatgtcagcagacagcaggaggacttgacaaatgtcagccctgcttggggccaggatacactgagggaacgatgacattccaatgaaactccaaattctgtattggaaaagtcattgatttgt

SEQ ID NO: 10420 - protein, 331 aa, Homo sapiens; identical to SEQ ID NO: 1309

SEQ ID NO: 10421 - DNA, 2347 bp, Homo sapiens
agcaggagggtgggaccaagggtgctgctggaccaaggatgggactgggccaagggtggggctgggaagcatcctgttttgcatgtttgatcaggagctgctgccaagttgtgactttcactttcccttttgggttccagggtatatctcagagcctggagaacgtgtctggttattatgcagatgcacggctggaggtgggatccacacagctcagaacagctggatcttgctcacactctttcaagagaagcttccttgaaaagaaacgctttactgaagaggccaccaaatacttccgggagagagtcagcccagtgcatctgcaaatcctgctgactaacaatgaagcctggaagagattcgtgactgcggctgaattgcccagggatgaggcagatgctctctacgaagctctgaagaagcttagaacatatgcagctattgaggacgaatatgtgcagcagaaagatgagcagtttagggaatggtttttgaaagagtttccccaagtcaagaggaagatccaggagtccatagaaaagcttcgtgcccttgcaaatggtattgaagaggtccacagaggctgcaccatctccaatgtggtgtccagctccactggcgctgcctctggcatcatgtcccttgctggtcttgttttggcaccatttacagcagggacgagtctggcccttactgcagctggggtagggctgggagcagcgtctgctgtgactgggatcaccaccagcatcgtggagcactcatacacatcatcagcagaagctgaagccagcaggctgactgcaaccagcattgaccgattgaaggtatttaaggaagttatgcgtgacatcacacccaacttactttcccttcttaataattattacgaagccacacaaaccattgggagtgaaatccgtgccatcaggcaagccagagccagggcccgactccctgtgaccacctggcgaatctcagctggaagtggtggtcaagcagagagaacgattgcaggcaccacccgggcagtgagcagaggagcccggatcctgagtgcgaccacttcaggcatcttccttgcactggatgtggtcaaccttgtatacgagtcaaagcacttgcatgagggggcaaagtctgcatctgctgaggagctgaggcggcaggctcaggagctggaggagaatctaatggagctcactcagatctatcagcgtctgaatccatgccatacccactgaccccagaccagtgcagccagcaggggaggtgagccatacacaggccacgacaaaatgcaggcattttattagggggataaagagggcaaggtaaagtttatggagctgagtgttagtgactttggcatttctgtagctgagcacagcaggggaggggttaatgcagatggcaagtgcaccaaggagaaggcaggaatgctggagcctggaataagggaggagaggggactggagagtgtggggaataggaagaagaaatttcctttagactaacgaatatattggggggaggaatagaggggaggtgtgcaggaaccagcaatgagaaggccaggaaaagaaagagctgaaaatgcagaaagccgaagagttagaacttttggatacagcagaagaaacagcggctccactaccgacctgcccccggttcgatgtccttccaagaatgaagtctttccctggtgatggtcccctgccctgtctttccagcatccactctgtcttgtcctcctggaagtgtatctcagtcagccagtggcttcttgatgatggcggtggaggtggtggttgtagtgtgatggatcccctttaggttatttaggggtatatgtcccctgcttgaaccctgaaggccaggtaatgagccatggccattgtccccagctgaggaccaggtgtctctaaaaacccaaacatcctggagagtatgcgagaacctaccaagaaaaacagtctcattactcatatacagcaggcaaagagacagaaaattaactgaaaagcagtttagagactgggggaggccggatctctagagccatcctgctgagtgccctgtgtgtaagtcctaataaactcacctactcaccaagctggacttattcgagtcattccttggtctcctggctcctttctcgctttgggagcaagttcctgtctgaagtttttgtctgaacagtggtaaaggtgatggtgatgatgtcagcagacagcaggaggacttgacaaatgtcagccctgcttggggccaggatacactgagggaacgatgacattccaatgaaactccaaattctgtattggaaaagtcattgatttgt

SEQ ID NO: 10422 - protein, 402 aa, Homo sapiens; identical to SEQ ID NO: 1315

SEQ ID NO: 10423 - DNA, 2444 bp, Homo sapiens
agcaggagggtgggaccaagggtgctgctggaccaaggatgggactgggccaagggtggggctgggaagcatcctgttttgcatgtttgatcaggagctgctgccaagttgtgactttcactttcccttttgggttccagggtatatctcagagcctggagaacgtgtctggttattatgcagatgcacggctggaggtgggatccacacagctcagaacagctggatcttgctcacactctttcaagagaagcttccttgggttaagaaaaaaaacgaacccttccagtcaggtcagtgactggagagctccatggaaagtctctcagtgacctggctgctggcaccatggactcagaaaagaaacgctttactgaagaggccaccaaatacttccgggagagagtcagcccagtgcatctgcaaatcctgctgactaacaatgaagcctggaagagattcgtgactgcggctgaattgcccagggatgaggcagatgctctctacgaagctctgaagaagcttagaacatatgcagctattgaggacgaatatgtgcagcagaaagatgagcagtttagggaatggtttttgaaagagtttccccaagtcaagaggaagatccaggagtccatagaaaagcttcgtgcccttgcaaatggtattgaagaggtccacagaggctgcaccatctccaatgtggtgtccagctccactggcgctgcctctggcatcatgtcccttgctggtcttgttttggcaccatttacagcagggacgagtctggcccttactgcagctggggtagggctgggagcagcgtctgctgtgactgggatcaccaccagcatcgtggagcactcatacacatcatcagcagaagctgaagccagcaggctgactgcaaccagcattgaccgattgaaggtatttaaggaagttatgcgtgacatcacacccaacttactttcccttcttaataattattacgaagccacacaaaccattgggagtgaaatccgtgccatcaggcaagccagagccagggcccgactccctgtgaccacctggcgaatctcagctggaagtggtggtcaagcagagagaacgattgcaggcaccacccgggcagtgagcagaggagcccggatcctgagtgcgaccacttcaggcatcttccttgcactggatgtggtcaaccttgtatacgagtcaaagcacttgcatgagggggcaaagtctgcatctgctgaggagctgaggcggcaggctcaggagctggaggagaatctaatggagctcactcagatctatcagcgtctgaatccatgccatacccactgaccccagaccagtgcagccagcaggggaggtgagccatacacaggccacgacaaaatgcaggcattttattagggggataaagagggcaaggtaaagtttatggagctgagtgttagtgactttggcatttctgtagctgagcacagcaggggaggggttaatgcagatggcaagtgcaccaaggagaaggcaggaatgctggagcctggaataagggaggagaggggactggagagtgtggggaataggaagaagaaatttcctttagactaacgaatatattggggggaggaatagaggggaggtgtgcaggaaccagcaatgagaaggccaggaaaagaaagagctgaaaatgcagaaagccgaagagttagaacttttggatacagcagaagaaacagcggctccactaccgacctgcccccggttcgatgtccttccaagaatgaagtctttccctggtgatggtcccctgccctgtctttccagcatccactctgtcttgtcctcctggaagtgtatctcagtcagccagtggcttcttgatgatggcggtggaggtggtggttgtagtgtgatggatcccctttaggttatttaggggtatatgtcccctgcttgaaccctgaaggccaggtaatgagccatggccattgtccccagctgaggaccaggtgtctctaaaaacccaaacatcctggagagtatgcgagaacctaccaagaaaaacagtctcattactcatatacagcaggcaaagagacagaaaattaactgaaaagcagtttagagactgggggaggccggatctctagagccatcctgctgagtgccctgtgtgtaagtcctaataaactcacctactcaccaagctggacttattcgagtcattccttggtctcctggctcctttctcgctttgggagcaagttcctgtctgaagtttttgtctgaacagtggtaaaggtgatggtgatgatgtcagcagacagcaggaggacttgacaaatgtcagccctgcttggggccaggatacactgagggaacgatgacattccaatgaaactccaaattctgtattggaaaagtcattgatttgt

SEQ ID NO: 10424 - protein, 331 aa, Homo sapiens; identical to SEQ ID NO: 1309

SEQ ID NO: 10425 - DNA, 2557 bp, Homo sapiens
agcaggagggtgggaccaagggtgctgctggaccaaggatgggactgggccaagggtggggctgggaagcatcctgttttgcatgtttgatcaggagctgctgccaagttgtgactttcactttcccttttgggttccagggtatatctcagagcctggagaacgtgtctggttattatgcagatgcacggctggaggtgggatccacacagctcagaacagctggatcttgctcacactctttcaagagaagcttccttggacaaaaggaccctgccttggtgtgagagtgagggcagagggagctggagcaagtagaatttctctaaataccagctggctggggcccaggagattaaaaaacaccgggctagggttaagaaaaaaaacgaacccttccagtcaggtcagtgactggagagctccatggaaagtctctcagtgacctggctgctggcaccatggactcagaaaagaaacgctttactgaagaggccaccaaatacttccgggagagagtcagcccagtgcatctgcaaatcctgctgactaacaatgaagcctggaagagattcgtgactgcggctgaattgcccagggatgaggcagatgctctctacgaagctctgaagaagcttagaacatatgcagctattgaggacgaatatgtgcagcagaaagatgagcagtttagggaatggtttttgaaagagtttccccaagtcaagaggaagatccaggagtccatagaaaagcttcgtgcccttgcaaatggtattgaagaggtccacagaggctgcaccatctccaatgtggtgtccagctccactggcgctgcctctggcatcatgtcccttgctggtcttgttttggcaccatttacagcagggacgagtctggcccttactgcagctggggtagggctgggagcagcgtctgctgtgactgggatcaccaccagcatcgtggagcactcatacacatcatcagcagaagctgaagccagcaggctgactgcaaccagcattgaccgattgaaggtatttaaggaagttatgcgtgacatcacacccaacttactttcccttcttaataattattacgaagccacacaaaccattgggagtgaaatccgtgccatcaggcaagccagagccagggcccgactccctgtgaccacctggcgaatctcagctggaagtggtggtcaagcagagagaacgattgcaggcaccacccgggcagtgagcagaggagcccggatcctgagtgcgaccacttcaggcatcttccttgcactggatgtggtcaaccttgtatacgagtcaaagcacttgcatgagggggcaaagtctgcatctgctgaggagctgaggcggcaggctcaggagctggaggagaatctaatggagctcactcagatctatcagcgtctgaatccatgccatacccactgaccccagaccagtgcagccagcaggggaggtgagccatacacaggccacgacaaaatgcaggcattttattagggggataaagagggcaaggtaaagtttatggagctgagtgttagtgactttggcatttctgtagctgagcacagcaggggaggggttaatgcagatggcaagtgcaccaaggagaaggcaggaatgctggagcctggaataagggaggagaggggactggagagtgtggggaataggaagaagaaatttcctttagactaacgaatatattggggggaggaatagaggggaggtgtgcaggaaccagcaatgagaaggccaggaaaagaaagagctgaaaatgcagaaagccgaagagttagaacttttggatacagcagaagaaacagcggctccactaccgacctgcccccggttcgatgtccttccaagaatgaagtctttccctggtgatggtcccctgccctgtctttccagcatccactctgtcttgtcctcctggaagtgtatctcagtcagccagtggcttcttgatgatggcggtggaggtggtggttgtagtgtgatggatcccctttaggttatttaggggtatatgtcccctgcttgaaccctgaaggccaggtaatgagccatggccattgtccccagctgaggaccaggtgtctctaaaaacccaaacatcctggagagtatgcgagaacctaccaagaaaaacagtctcattactcatatacagcaggcaaagagacagaaaattaactgaaaagcagtttagagactgggggaggccggatctctagagccatcctgctgagtgccctgtgtgtaagtcctaataaactcacctactcaccaagctggacttattcgagtcattccttggtctcctggctcctttctcgctttgggagcaagttcctgtctgaagtttttgtctgaacagtggtaaaggtgatggtgatgatgtcagcagacagcaggaggacttgacaaatgtcagccctgcttggggccaggatacactgagggaacgatgacattccaatgaaactccaaattctgtattggaaaagtcattgatttgt

SEQ ID NO: 10426 - protein, 331 aa, Homo sapiens; identical to SEQ ID NO: 1309

SEQ ID NO: 10427 - DNA, 3856 bp, Homo sapiens
actctggggaaaggagggtacaaccacatgtaaattttattataatgatggtataatgaacttggggtgacctgagggcatgtttttgtgttactgggcatgtgcccctttaggagacttccacctgtgccttactttctctttctttgggatgtgctggccacagactttaccaaaaactccatccattaggatggcattaggacggttctggggctaaacttaggtgggccaggggctgtttcactgtcagcctttctactctcttttcttacccactcctagctgctaatgtctatttaactacctaatatttccccctttagagaaaaaaagccaaatttttgggtagatcggtgacaattaatctggctacttcctgctgacaagaggcagtggtaataattgggttctcttttttgctctcttgtagctggtaggttgggcagagaaaagtggtggccatccaaggggcccacgtagatatcagacatggttgagacctcgcggtaaccttgtgtagaatcatttggagttttatggattctaggtgggaagaaacaaaacaaccttgtaaatcaaatgagcatcgtttgaaagctataagttgtataaagctgttttaggaccaagaaagggggctaaccaggaaaaccaggaccagttgttaaatttccaccagtcaaagcctcctgaaactctgttttccattaacttgttggccctgtctgtaatttttttaagttggtttgcactttacctgattggttgatgaaaacagcaatgtttatcaagtgttgcacaagctcccccttgattggctgtgagcaaattaaaagctcatcaatttcataagactatgcttgctaatgaagcaatttgttctgaaagggtattgacctggttagttagattaataatttgttgagtaatttttaagaagagtttctgggcagtaaaaatggagttaaggaggtcctccagttcccgtgccaataccagccagaacgccaattatagtcagtgctgttaaaactcctctttcagttttaccagattgagcgtgtatagggaggggaatgctatcgataagagtgagtttggggatgatgtaaactagggccaaatccccgtttaattagcagacaagcagagatatgccttgtttctatacaaaaatgtgatttgtcatgttaagacaaatatcaacagtgatactaaagtagggtttttccatgctgtgtaagtctgctttaataccctcagaagtggaagtcaaggctagttcatgtaatgggggaacacaggcagtacttgacagaatgaaagaggaatcaaaagcccaattagaggaaggagtgatgggatcccaaccaatattgtgaaattatggggagctgcagttttttgcaatgattttgcccgaagttgtgagactgaaaccagaagttgttatgtttaaaatgatattctggtgtgggtctggggaaaagggtagatccagaatagctggcttctttccacatagtggttctgttggggggcttgggaaatgaataaaacacaaagaagaattagaatatcaggtgaaggtagcaggtgctcctggcagaagaacccacataaggaagtgtccagaagccacacagggtatatctcagagcctggagaacgtgtctggttattatgcagatgcacggctggaggtgggatccacacagctcagaacagctggatcttgctcacactctttcaagagaagcttccttgaaaagaaacgctttactgaagaggccaccaaatacttccgggagagagtcagcccagtgcatctgcaaatcctgctgactaacaatgaagcctggaagagattcgtgactgcggctgaattgcccagggatgaggcagatgctctctacgaagctctgaagaagcttagaacatatgcagctattgaggacgaatatgtgcagcagaaagatgagcagtttagggaatggtttttgaaagagtttccccaagtcaagaggaagatccaggagtccatagaaaagcttcgtgcccttgcaaatggtattgaagaggtccacagaggctgcaccatctccaatgtggtgtccagctccactggcgctgcctctggcatcatgtcccttgctggtcttgttttggcaccatttacagcagggacgagtctggcccttactgcagctggggtagggctgggagcagcgtctgctgtgactgggatcaccaccagcatcgtggagcactcatacacatcatcagcagaagctgaagccagcaggctgactgcaaccagcattgaccgattgaaggtatttaaggaagttatgcgtgacatcacacccaacttactttcccttcttaataattattacgaagccacacaaaccattgggagtgaaatccgtgccatcaggcaagccagagccagggcccgactccctgtgaccacctggcgaatctcagctggaagtggtggtcaagcagagagaacgattgcaggcaccacccgggcagtgagcagaggagcccggatcctgagtgcgaccacttcaggcatcttccttgcactggatgtggtcaaccttgtatacgagtcaaagcacttgcatgagggggcaaagtctgcatctgctgaggagctgaggcggcaggctcaggagctggaggagaatctaatggagctcactcagatctatcagcgtctgaatccatgccatacccactgaccccagaccagtgcagccagcaggggaggtgagccatacacaggccacgacaaaatgcaggcattttattagggggataaagagggcaaggtaaagtttatggagctgagtgttagtgactttggcatttctgtagctgagcacagcaggggaggggttaatgcagatggcaagtgcaccaaggagaaggcaggaatgctggagcctggaataagggaggagaggggactggagagtgtggggaataggaagaagaaatttcctttagactaacgaatatattggggggaggaatagaggggaggtgtgcaggaaccagcaatgagaaggccaggaaaagaaagagctgaaaatgcagaaagccgaagagttagaacttttggatacagcagaagaaacagcggctccactaccgacctgcccccggttcgatgtccttccaagaatgaagtctttccctggtgatggtcccctgccctgtctttccagcatccactctgtcttgtcctcctggaagtgtatctcagtcagccagtggcttcttgatgatggcggtggaggtggtggttgtagtgtgatggatcccctttaggttatttaggggtatatgtcccctgcttgaaccctgaaggccaggtaatgagccatggccattgtccccagctgaggaccaggtgtctctaaaaacccaaacatcctggagagtatgcgagaacctaccaagaaaaacagtctcattactcatatacagcaggcaaagagacagaaaattaactgaaaagcagtttagagactgggggaggccggatctctagagccatcctgctgagtgccctgtgtgtaagtcctaataaactcacctactcaccaagctggacttattcgagtcattccttggtctcctggctcctttctcgctttgggagcaagttcctgtctgaagtttttgtctgaacagtggtaaaggtgatggtgatgatgtcagcagacagcaggaggacttgacaaatgtcagccctgcttggggccaggatacactgagggaacgatgacattccaatgaaactccaaattctgtattggaaaagtcattgatttgt

SEQ ID NO: 10428 - protein, 72 aa, Homo sapiens
MNKTQRRIRISGEGSRCSWQKNPHKEVSRSHTGYISEPGERVWLLCRCTAGGGIHTAQNSWILLTLFQEKLP

SEQ ID NO: 10429 - DNA, 3793 bp, Homo sapiens
actctggggaaaggagggtacaaccacatgtaaattttattataatgatggtataatgaacttggggtgacctgagggcatgtttttgtgttactgggcatgtgcccctttaggagacttccacctgtgccttactttctctttctttgggatgtgctggccacagactttaccaaaaactccatccattaggatggcattaggacggttctggggctaaacttaggtgggccaggggctgtttcactgtcagcctttctactctcttttcttacccactcctagctgctaatgtctatttaactacctaatatttccccctttagagaaaaaaagccaaatttttgggtagatcggtgacaattaatctggctacttcctgctgacaagaggcagtggtaataattgggttctcttttttgctctcttgtagctggtaggttgggcagagaaaagtggtggccatccaaggggcccacgtagatatcagacatggttgagacctcgcggtaaccttgtgtagaatcatttggagttttatggattctaggtgggaagaaacaaaacaaccttgtaaatcaaatgagcatcgtttgaaagctataagttgtataaagctgttttaggaccaagaaagggggctaaccaggaaaaccaggaccagttgttaaatttccaccagtcaaagcctcctgaaactctgttttccattaacttgttggccctgtctgtaatttttttaagttggtttgcactttacctgattggttgatgaaaacagcaatgtttatcaagtgttgcacaagctcccccttgattggctgtgagcaaattaaaagctcatcaatttcataagactatgcttgctaatgaagcaatttgttctgaaagggtattgacctggttagttagattaataatttgttgagtaatttttaagaagagtttctgggcagtaaaaatggagttaaggaggtcctccagttcccgtgccaataccagccagaacgccaattatagtcagtgctgttaaaactcctctttcagttttaccagattgagcgtgtatagggaggggaatgctatcgataagagtgagtttggggatgatgtaaactagggccaaatccccgtttaattagcagacaagcagagatatgccttgtttctatacaaaaatgtgatttgtcatgttaagacaaatatcaacagtgatactaaagtagggtttttccatgctgtgtaagtctgctttaataccctcagaagtggaagtcaaggctagttcatgtaatgggggaacacaggcagtacttgacagaatgaaagaggaatcaaaagcccaattagaggaaggagtgatgggatcccaaccaatattgtgaaattatggggagctgcagttttttgcaatgattttgcccgaagttgtgagactgaaaccagaagttgttatgtttaaaatgatattctggtgtgggtctggggaaaagggtagatccagaatagctggcttctttccacatagtggttctgttggggggcttgggaaatgaataaaacacaaagaagaattagaatatcagggtatatctcagagcctggagaacgtgtctggttattatgcagatgcacggctggaggtgggatccacacagctcagaacagctggatcttgctcacactctttcaagagaagcttccttgaaaagaaacgctttactgaagaggccaccaaatacttccgggagagagtcagcccagtgcatctgcaaatcctgctgactaacaatgaagcctggaagagattcgtgactgcggctgaattgcccagggatgaggcagatgctctctacgaagctctgaagaagcttagaacatatgcagctattgaggacgaatatgtgcagcagaaagatgagcagtttagggaatggtttttgaaagagtttccccaagtcaagaggaagatccaggagtccatagaaaagcttcgtgcccttgcaaatggtattgaagaggtccacagaggctgcaccatctccaatgtggtgtccagctccactggcgctgcctctggcatcatgtcccttgctggtcttgttttggcaccatttacagcagggacgagtctggcccttactgcagctggggtagggctgggagcagcgtctgctgtgactgggatcaccaccagcatcgtggagcactcatacacatcatcagcagaagctgaagccagcaggctgactgcaaccagcattgaccgattgaaggtatttaaggaagttatgcgtgacatcacacccaacttactttcccttcttaataattattacgaagccacacaaaccattgggagtgaaatccgtgccatcaggcaagccagagccagggcccgactccctgtgaccacctggcgaatctcagctggaagtggtggtcaagcagagagaacgattgcaggcaccacccgggcagtgagcagaggagcccggatcctgagtgcgaccacttcaggcatcttccttgcactggatgtggtcaaccttgtatacgagtcaaagcacttgcatgagggggcaaagtctgcatctgctgaggagctgaggcggcaggctcaggagctggaggagaatctaatggagctcactcagatctatcagcgtctgaatccatgccatacccactgaccccagaccagtgcagccagcaggggaggtgagccatacacaggccacgacaaaatgcaggcattttattagggggataaagagggcaaggtaaagtttatggagctgagtgttagtgactttggcatttctgtagctgagcacagcaggggaggggttaatgcagatggcaagtgcaccaaggagaaggcaggaatgctggagcctggaataagggaggagaggggactggagagtgtggggaataggaagaagaaatttcctttagactaacgaatatattggggggaggaatagaggggaggtgtgcaggaaccagcaatgagaaggccaggaaaagaaagagctgaaaatgcagaaagccgaagagttagaacttttggatacagcagaagaaacagcggctccactaccgacctgcccccggttcgatgtccttccaagaatgaagtctttccctggtgatggtcccctgccctgtctttccagcatccactctgtcttgtcctcctggaagtgtatctcagtcagccagtggcttcttgatgatggcggtggaggtggtggttgtagtgtgatggatcccctttaggttatttaggggtatatgtcccctgcttgaaccctgaaggccaggtaatgagccatggccattgtccccagctgaggaccaggtgtctctaaaaacccaaacatcctggagagtatgcgagaacctaccaagaaaaacagtctcattactcatatacagcaggcaaagagacagaaaattaactgaaaagcagtttagagactgggggaggccggatctctagagccatcctgctgagtgccctgtgtgtaagtcctaataaactcacctactcaccaagctggacttattcgagtcattccttggtctcctggctcctttctcgctttgggagcaagttcctgtctgaagtttttgtctgaacagtggtaaaggtgatggtgatgatgtcagcagacagcaggaggacttgacaaatgtcagccctgcttggggccaggatacactgagggaacgatgacattccaatgaaactccaaattctgtattggaaaagtcattgatttgt

SEQ ID NO: 10430 - protein, 53 aa, Homo sapiens
MQMHGWRWDPHSSEQLDLAHTLSREASLKRNALLKRPPNTSGRESAQCICKSC

SEQ ID NO: 10431 - DNA, 2220 bp, Homo sapiens
agcaggagggtgggaccaagggtgctgctggaccaaggatgggactgggccaagggtggggctgggaagcatcctgttttgcatgtttgatcaggagctgctgccaagttgtgactttcactttcccttttgggttccagggtatatctcagagcctggagaacgtgtctggttattatgcagatgcacggctggaggtgggatccacacagctcagaacagctggatcttgctcacactctttcaagagaagcttccttgggttaagaaaaaaaacgaacccttccagtcaggtcagtgactggagagctccatggaaagtctctcagtgacctggctgctggcaccatggactcagaaaagaaacgctttactgaagaggccaccaaatacttccgggagagagtcagcccagtgcatctgcaaatcctgctgactaacaatgaagcctggaagagattcgtgactgcggctgaattgcccagggatgaggcagatgctctctacgaagctctgaagaagcttagaacatatgcagctattgaggacgaatatgtgcagcagaaagatgagcagtttagggaatggtttttgaaagagtttccccaagtcaagaggaagatccaggagtccatagaaaagcttcgtgcccttgcaaatggtattgaagaggtccacagaggctgcaccatctccaatgtggtgtccagctccactggcgctgcctctggcatcatgtcccttgctggtcttgttttggcaccatttacagcagggacgagtctggcccttactgcagctggggtagggctgggagcagcgtctgctgtgactgggatcaccaccagcatcgtggagcactcatacacatcatcagcagaagctgaagccagcaggctgactgcaaccagcattgaccgattgaaggtatttaaggaagttatgcgtgacatcacacccaacttactttcccttcttaataattattacgaagccacacaaaccattgggagtgaaatccgtgccatcaggcaagccagagccagggcccgactccctgtgaccacctggcgaatctcagctggaagtggtggtcaagcagagagaacgattgcaggcaccacccgggcagtgagcagaggagcccggatcctgagtgcgaccacttcaggcatcttccttgcactggatgtggtcaaccttgtatacgagtcaaagcacttgcatgagggggcaaagtctgcatctgctgaggagctgaggcggcaggctcaggagctggaggagaatctaatggagctcactcagatctatcagcgtctgaatccatgccatacccactgaccccagaccagtgcagccagcaggggaggtgagccatacacaggccacgacaaaatgcaggcattttattagggggataaagagggcaaggtaaagtttatggagctgagtgttagtgactttggcatttctgtagctgagcacagcaggggaggggttaatgcagatggcaagtgcaccaaggagaaggcaggaatgctggagcctggaataagggaggagaggggactggagagtgtggggaataggaagaagaaatttcctttagactaacgaatatattggggggaggaatagaggggaggtgtgcaggaaccagcaatgagaaggccaggaaaagaaagagctgaaaatgcagaaagccgaagagttagaacttttggatacagcagaagaaacagcggctccactaccgacctgcccccggttcgatgtccttccaagaatgaagtctttccctggtgatggtcccctgccctgtctttccagcatccactctgtcttgtcctcctggaagtgtatctcagtcagccagtggcttcttgatgatggcggtggaggtggtggttgtagtgtgatggatcccctttaggttatttaggggtatatgtcccctgcttgaaccctgaaggccaggtaatgagccatggccattgtccccagctgaggaccaggtgtctctaaaaacccaaacatcctggagagtatgcgagaacctaccaagaaaaacagtctcattactcatatacagcaggcaaagagacagaaaattaactgaaaagcagtttagagactgggggaggccggatctctagagccatcctgctgagtgccctgtgtgtaagtcctaataaactcacctactcaccaagctgg

SEQ ID NO: 10432 - protein, 331 aa, Homo sapiens; identical to SEQ ID NO: 1309

SEQ ID NO: 10433 - DNA, 2137 bp, Homo sapiens
tagacaccagtcctgtaggattagggccctacccttacgactctctttaaattaatgacttccttaaaggctcaatctccaaatatagttactggggtttagggtctcagtatatgaatttggagggcacacaactcagtctatagcactgatgcctccatcaaaaataccccatgtgacagctggttgaggaggattaacctcgaaccaccttattctcaatgccatttaggctgtagcacactttcttccaatcttatgctttttgtttccaagtagaaaagaaacgctttactgaagaggccaccaaatacttccgggagagagtcagcccagtgcatctgcaaatcctgctgactaacaatgaagcctggaagagattcgtgactgcggctgaattgcccagggatgaggcagatgctctctacgaagctctgaagaagcttagaacatatgcagctattgaggacgaatatgtgcagcagaaagatgagcagtttagggaatggtttttgaaagagtttccccaagtcaagaggaagatccaggagtccatagaaaagcttcgtgcccttgcaaatggtattgaagaggtccacagaggctgcaccatctccaatgtggtgtccagctccactggcgctgcctctggcatcatgtcccttgctggtcttgttttggcaccatttacagcagggacgagtctggcccttactgcagctggggtagggctgggagcagcgtctgctgtgactgggatcaccaccagcatcgtggagcactcatacacatcatcagcagaagctgaagccagcaggctgactgcaaccagcattgaccgattgaaggtatttaaggaagttatgcgtgacatcacacccaacttactttcccttcttaataattattacgaagccacacaaaccattgggagtgaaatccgtgccatcaggcaagccagagccagggcccgactccctgtgaccacctggcgaatctcagctggaagtggtggtcaagcagagagaacgattgcaggcaccacccgggcagtgagcagaggagcccggatcctgagtgcgaccacttcaggcatcttccttgcactggatgtggtcaaccttgtatacgagtcaaagcacttgcatgagggggcaaagtctgcatctgctgaggagctgaggcggcaggctcaggagctggaggagaatctaatggagctcactcagatctatcagcgtctgaatccatgccatacccactgaccccagaccagtgcagccagcaggggaggtgagccatacacaggccacgacaaaatgcaggcattttattagggggataaagagggcaaggtaaagtttatggagctgagtgttagtgactttggcatttctgtagctgagcacagcaggggaggggttaatgcagatggcaagtgcaccaaggagaaggcaggaatgctggagcctggaataagggaggagaggggactggagagtgtggggaataggaagaagaaatttcctttagactaacgaatatattggggggaggaatagaggggaggtgtgcaggaaccagcaatgagaaggccaggaaaagaaagagctgaaaatgcagaaagccgaagagttagaacttttggatacagcagaagaaacagcggctccactaccgacctgcccccggttcgatgtccttccaagaatgaagtctttccctggtgatggtcccctgccctgtctttccagcatccactctgtcttgtcctcctggaagtgtatctcagtcagccagtggcttcttgatgatggcggtggaggtggtggttgtagtgtgatggatcccctttaggttatttaggggtatatgtcccctgcttgaaccctgaaggccaggtaatgagccatggccattgtccccagctgaggaccaggtgtctctaaaaacccaaacatcctggagagtatgcgagaacctaccaagaaaaacagtctcattactcatatacagcaggcaaagagacagaaaattaactgaaaagcagtttagagactgggggaggccggatctctagagccatcctgctgagtgccctgtgtgtaagtcctaataaactcacctactcaccaag

SEQ ID NO: 10434 - protein, 202 aa, Homo sapiens; identical to SEQ ID NO: 1317

SEQ ID NO: 10435 - DNA, 2092 bp, Homo sapiens
gatttcagccaggctgtgccacggagggcagaggccacccaggtcagtcataggggatgcagctgggaacaccgcagggtccctgccggatgctcagagtttaacggggagacagaggcccaaagagccacacagagggttaagaaaaaaaacgaacccttccagtcaggtcagtgactggagagctccatggaaagtctctcagtgacctggctgctggcaccatggactcagaaaagaaacgctttactgaagaggccaccaaatacttccgggagagagtcagcccagtgcatctgcaaatcctgctgactaacaatgaagcctggaagagattcgtgactgcggctgaattgcccagggatgaggcagatgctctctacgaagctctgaagaagcttagaacatatgcagctattgaggacgaatatgtgcagcagaaagatgagcagtttagggaatggtttttgaaagagtttccccaagtcaagaggaagatccaggagtccatagaaaagcttcgtgcccttgcaaatggtattgaagaggtccacagaggctgcaccatctccaatgtggtgtccagctccactggcgctgcctctggcatcatgtcccttgctggtcttgttttggcaccatttacagcagggacgagtctggcccttactgcagctggggtagggctgggagcagcgtctgctgtgactgggatcaccaccagcatcgtggagcactcatacacatcatcagcagaagctgaagccagcaggctgactgcaaccagcattgaccgattgaaggtatttaaggaagttatgcgtgacatcacacccaacttactttcccttcttaataattattacgaagccacacaaaccattgggagtgaaatccgtgccatcaggcaagccagagccagggcccgactccctgtgaccacctggcgaatctcagctggaagtggtggtcaagcagagagaacgattgcaggcaccacccgggcagtgagcagaggagcccggatcctgagtgcgaccacttcaggcatcttccttgcactggatgtggtcaaccttgtatacgagtcaaagcacttgcatgagggggcaaagtctgcatctgctgaggagctgaggcggcaggctcaggagctggaggagaatctaatggagctcactcagatctatcagcgtctgaatccatgccatacccactgaccccagaccagtgcagccagcaggggaggtgagccatacacaggccacgacaaaatgcaggcattttattagggggataaagagggcaaggtaaagtttatggagctgagtgttagtgactttggcatttctgtagctgagcacagcaggggaggggttaatgcagatggcaagtgcaccaaggagaaggcaggaatgctggagcctggaataagggaggagaggggactggagagtgtggggaataggaagaagaaatttcctttagactaacgaatatattggggggaggaatagaggggaggtgtgcaggaaccagcaatgagaaggccaggaaaagaaagagctgaaaatgcagaaagccgaagagttagaacttttggatacagcagaagaaacagcggctccactaccgacctgcccccggttcgatgtccttccaagaatgaagtctttccctggtgatggtcccctgccctgtctttccagcatccactctgtcttgtcctcctggaagtgtatctcagtcagccagtggcttcttgatgatggcggtggaggtggtggttgtagtgtgatggatcccctttaggttatttaggggtatatgtcccctgcttgaaccctgaaggccaggtaatgagccatggccattgtccccagctgaggaccaggtgtctctaaaaacccaaacatcctggagagtatgcgagaacctaccaagaaaaacagtctcattactcatatacagcaggcaaagagacagaaaattaactgaaaagcagtttagagactgggggaggccggatctctagagccatcctgctgagtgccctgtgtgtaagtcctaataaactcacctactcaccaag

SEQ ID NO: 10436 - protein, 331 aa, Homo sapiens; identical to SEQ ID NO: 1309

SEQ ID NO: 10437 - DNA, 1951 bp, Homo sapiens
gttgtccagaggctggttgcttttagtccaagtgctgcctcccacacctcggatttcagccaggctgtgccacggagggcagaggccacccagaaaagaaacgctttactgaagaggccaccaaatacttccgggagagagtcagcccagtgcatctgcaaatcctgctgactaacaatgaagcctggaagagattcgtgactgcggctgaattgcccagggatgaggcagatgctctctacgaagctctgaagaagcttagaacatatgcagctattgaggacgaatatgtgcagcagaaagatgagcagtttagggaatggtttttgaaagagtttccccaagtcaagaggaagatccaggagtccatagaaaagcttcgtgcccttgcaaatggtattgaagaggtccacagaggctgcaccatctccaatgtggtgtccagctccactggcgctgcctctggcatcatgtcccttgctggtcttgttttggcaccatttacagcagggacgagtctggcccttactgcagctggggtagggctgggagcagcgtctgctgtgactgggatcaccaccagcatcgtggagcactcatacacatcatcagcagaagctgaagccagcaggctgactgcaaccagcattgaccgattgaaggtatttaaggaagttatgcgtgacatcacacccaacttactttcccttcttaataattattacgaagccacacaaaccattgggagtgaaatccgtgccatcaggcaagccagagccagggcccgactccctgtgaccacctggcgaatctcagctggaagtggtggtcaagcagagagaacgattgcaggcaccacccgggcagtgagcagaggagcccggatcctgagtgcgaccacttcaggcatcttccttgcactggatgtggtcaaccttgtatacgagtcaaagcacttgcatgagggggcaaagtctgcatctgctgaggagctgaggcggcaggctcaggagctggaggagaatctaatggagctcactcagatctatcagcgtctgaatccatgccatacccactgaccccagaccagtgcagccagcaggggaggtgagccatacacaggccacgacaaaatgcaggcattttattagggggataaagagggcaaggtaaagtttatggagctgagtgttagtgactttggcatttctgtagctgagcacagcaggggaggggttaatgcagatggcaagtgcaccaaggagaaggcaggaatgctggagcctggaataagggaggagaggggactggagagtgtggggaataggaagaagaaatttcctttagactaacgaatatattggggggaggaatagaggggaggtgtgcaggaaccagcaatgagaaggccaggaaaagaaagagctgaaaatgcagaaagccgaagagttagaacttttggatacagcagaagaaacagcggctccactaccgacctgcccccggttcgatgtccttccaagaatgaagtctttccctggtgatggtcccctgccctgtctttccagcatccactctgtcttgtcctcctggaagtgtatctcagtcagccagtggcttcttgatgatggcggtggaggtggtggttgtagtgtgatggatcccctttaggttatttaggggtatatgtcccctgcttgaaccctgaaggccaggtaatgagccatggccattgtccccagctgaggaccaggtgtctctaaaaacccaaacatcctggagagtatgcgagaacctaccaagaaaaacagtctcattactcatatacagcaggcaaagagacagaaaattaactgaaaagcagtttagagactgggggaggccggatctctagagccatcctgctgagtgccctgtgtgtaagtcctaataaactcacctactcaccaag

SEQ ID NO: 10438 - protein, 202 aa, Homo sapiens; identical to SEQ ID NO: 1317

SEQ ID NO: 10439 - DNA, 2104 bp, Homo sapiens
gaagctgggccatgttgtccagaggctggttgcttttagtccaagtgctgcctcccacacctcggatttcagccaggctgtgccacggagggcagaggccacccaggtggctcacattcagtcccacaatttgctttctcctcctcaagggttaagaaaaaaaacgaacccttccagtcaggtcagtgactggagagctccatggaaagtctctcagtgacctggctgctggcaccatggactcagaaaagaaacgctttactgaagaggccaccaaatacttccgggagagagtcagcccagtgcatctgcaaatcctgctgactaacaatgaagcctggaagagattcgtgactgcggctgaattgcccagggatgaggcagatgctctctacgaagctctgaagaagcttagaacatatgcagctattgaggacgaatatgtgcagcagaaagatgagcagtttagggaatggtttttgaaagagtttccccaagtcaagaggaagatccaggagtccatagaaaagcttcgtgcccttgcaaatggtattgaagaggtccacagaggctgcaccatctccaatgtggtgtccagctccactggcgctgcctctggcatcatgtcccttgctggtcttgttttggcaccatttacagcagggacgagtctggcccttactgcagctggggtagggctgggagcagcgtctgctgtgactgggatcaccaccagcatcgtggagcactcatacacatcatcagcagaagctgaagccagcaggctgactgcaaccagcattgaccgattgaaggtatttaaggaagttatgcgtgacatcacacccaacttactttcccttcttaataattattacgaagccacacaaaccattgggagtgaaatccgtgccatcaggcaagccagagccagggcccgactccctgtgaccacctggcgaatctcagctggaagtggtggtcaagcagagagaacgattgcaggcaccacccgggcagtgagcagaggagcccggatcctgagtgcgaccacttcaggcatcttccttgcactggatgtggtcaaccttgtatacgagtcaaagcacttgcatgagggggcaaagtctgcatctgctgaggagctgaggcggcaggctcaggagctggaggagaatctaatggagctcactcagatctatcagcgtctgaatccatgccatacccactgaccccagaccagtgcagccagcaggggaggtgagccatacacaggccacgacaaaatgcaggcattttattagggggataaagagggcaaggtaaagtttatggagctgagtgttagtgactttggcatttctgtagctgagcacagcaggggaggggttaatgcagatggcaagtgcaccaaggagaaggcaggaatgctggagcctggaataagggaggagaggggactggagagtgtggggaataggaagaagaaatttcctttagactaacgaatatattggggggaggaatagaggggaggtgtgcaggaaccagcaatgagaaggccaggaaaagaaagagctgaaaatgcagaaagccgaagagttagaacttttggatacagcagaagaaacagcggctccactaccgacctgcccccggttcgatgtccttccaagaatgaagtctttccctggtgatggtcccctgccctgtctttccagcatccactctgtcttgtcctcctggaagtgtatctcagtcagccagtggcttcttgatgatggcggtggaggtggtggttgtagtgtgatggatcccctttaggttatttaggggtatatgtcccctgcttgaaccctgaaggccaggtaatgagccatggccattgtccccagctgaggaccaggtgtctctaaaaacccaaacatcctggagagtatgcgagaacctaccaagaaaaacagtctcattactcatatacagcaggcaaagagacagaaaattaactgaaaagcagtttagagactgggggaggccggatctctagagccatcctgctgagtgccctgtgtgtaagtcctaataaactcacctactcaccaag

SEQ ID NO: 10440 - protein, 331 aa, Homo sapiens; identical to SEQ ID NO: 1309

SEQ ID NO: 10441 - DNA, 2067 bp, Homo sapiens
gaaactgaagctgggccatgttgtccagaggctggttgcttttagtccaagtgctgcctcccacacctcggatttcagccaggctgtgccacggagggcagaggccacccagggttaagaaaaaaaacgaacccttccagtcaggtcagtgactggagagctccatggaaagtctctcagtgacctggctgctggcaccatggactcagaaaagaaacgctttactgaagaggccaccaaatacttccgggagagagtcagcccagtgcatctgcaaatcctgctgactaacaatgaagcctggaagagattcgtgactgcggctgaattgcccagggatgaggcagatgctctctacgaagctctgaagaagcttagaacatatgcagctattgaggacgaatatgtgcagcagaaagatgagcagtttagggaatggtttttgaaagagtttccccaagtcaagaggaagatccaggagtccatagaaaagcttcgtgcccttgcaaatggtattgaagaggtccacagaggctgcaccatctccaatgtggtgtccagctccactggcgctgcctctggcatcatgtcccttgctggtcttgttttggcaccatttacagcagggacgagtctggcccttactgcagctggggtagggctgggagcagcgtctgctgtgactgggatcaccaccagcatcgtggagcactcatacacatcatcagcagaagctgaagccagcaggctgactgcaaccagcattgaccgattgaaggtatttaaggaagttatgcgtgacatcacacccaacttactttcccttcttaataattattacgaagccacacaaaccattgggagtgaaatccgtgccatcaggcaagccagagccagggcccgactccctgtgaccacctggcgaatctcagctggaagtggtggtcaagcagagagaacgattgcaggcaccacccgggcagtgagcagaggagcccggatcctgagtgcgaccacttcaggcatcttccttgcactggatgtggtcaaccttgtatacgagtcaaagcacttgcatgagggggcaaagtctgcatctgctgaggagctgaggcggcaggctcaggagctggaggagaatctaatggagctcactcagatctatcagcgtctgaatccatgccatacccactgaccccagaccagtgcagccagcaggggaggtgagccatacacaggccacgacaaaatgcaggcattttattagggggataaagagggcaaggtaaagtttatggagctgagtgttagtgactttggcatttctgtagctgagcacagcaggggaggggttaatgcagatggcaagtgcaccaaggagaaggcaggaatgctggagcctggaataagggaggagaggggactggagagtgtggggaataggaagaagaaatttcctttagactaacgaatatattggggggaggaatagaggggaggtgtgcaggaaccagcaatgagaaggccaggaaaagaaagagctgaaaatgcagaaagccgaagagttagaacttttggatacagcagaagaaacagcggctccactaccgacctgcccccggttcgatgtccttccaagaatgaagtctttccctggtgatggtcccctgccctgtctttccagcatccactctgtcttgtcctcctggaagtgtatctcagtcagccagtggcttcttgatgatggcggtggaggtggtggttgtagtgtgatggatcccctttaggttatttaggggtatatgtcccctgcttgaaccctgaaggccaggtaatgagccatggccattgtccccagctgaggaccaggtgtctctaaaaacccaaacatcctggagagtatgcgagaacctaccaagaaaaacagtctcattactcatatacagcaggcaaagagacagaaaattaactgaaaagcagtttagagactgggggaggccggatctctagagccatcctgctgagtgccctgtgtgtaagtcctaataaactcacctactcaccaag

SEQ ID NO: 10442 - protein, 331 aa, Homo sapiens; identical to SEQ ID NO: 1309

SEQ ID NO: 10443 - DNA, 1964 bp, Homo sapiens
ttatgcagatgcacggctggaggtgggatccacacagctcagaacagctggatcttgctcacactctttcaagagaagcttccttgggttaagaaaaaaaacgaacccttccagtcaggtcagtgactggagagctccatggaaagtctctcagtgacctggctgctggcaccatggactcagaaaagaaacgctttactgaagagattcgtgactgcggctgaattgcccagggatgaggcagatgctctctacgaagctctgaagaagcttagaacatatgcagctattgaggacgaatatgtgcagcagaaagatgagcagtttagggaatggtttttgaaagagtttccccaagtcaagaggaagatccaggagtccatagaaaagcttcgtgcccttgcaaatggtattgaagaggtccacagaggctgcaccatctccaatgtggtgtccagctccactggcgctgcctctggcatcatgtcccttgctggtcttgttttggcaccatttacagcagggacgagtctggcccttactgcagctggggtagggctgggagcagcgtctgctgtgactgggatcaccaccagcatcgtggagcactcatacacatcatcagcagaagctgaagccagcaggctgactgcaaccagcattgaccgattgaaggtatttaaggaagttatgcgtgacatcacacccaacttactttcccttcttaataattattacgaagccacacaaaccattgggagtgaaatccgtgccatcaggcaagccagagccagggcccgactccctgtgaccacctggcgaatctcagctggaagtggtggtcaagcagagagaacgattgcaggcaccacccgggcagtgagcagaggagcccggatcctgagtgcgaccacttcaggcatcttccttgcactggatgtggtcaaccttgtatacgagtcaaagcacttgcatgagggggcaaagtctgcatctgctgaggagctgaggcggcaggctcaggagctggaggagaatctaatggagctcactcagatctatcagcgtctgaatccatgccatacccactgaccccagaccagtgcagccagcaggggaggtgagccatacacaggccacgacaaaatgcaggcattttattagggggataaagagggcaaggtaaagtttatggagctgagtgttagtgactttggcatttctgtagctgagcacagcaggggaggggttaatgcagatggcaagtgcaccaaggagaaggcaggaatgctggagcctggaataagggaggagaggggactggagagtgtggggaataggaagaagaaatttcctttagactaacgaatatattggggggaggaatagaggggaggtgtgcaggaaccagcaatgagaaggccaggaaaagaaagagctgaaaatgcagaaagccgaagagttagaacttttggatacagcagaagaaacagcggctccactaccgacctgcccccggttcgatgtccttccaagaatgaagtctttccctggtgatggtcccctgccctgtctttccagcatccactctgtcttgtcctcctggaagtgtatctcagtcagccagtggcttcttgatgatggcggtggaggtggtggttgtagtgtgatggatcccctttaggttatttaggggtatatgtcccctgcttgaaccctgaaggccaggtaatgagccatggccattgtccccagctgaggaccaggtgtctctaaaaacccaaacatcctggagagtatgcgagaacctaccaagaaaaacagtctcattactcatatacagcaggcaaagagacagaaaattaactgaaaagcagtttagagactgggggaggccggatctctagagccatcctgctgagtgccctgtgtgtaagtcctaataaactcacctactcaccaag

SEQ ID NO: 10444 - protein, 317 aa, Homo sapiens; identical to SEQ ID NO: 10404

SEQ ID NO: 10445 - DNA, 2085 bp, Homo sapiens
attatgcagatgcacggctggaggtgggatccacacagctcagaacagctggatcttgctcacactctttcaagagaagcttccttggtggctcacattcagtcccacaatttgctttctcctcctcaagggttaagaaaaaaaacgaacccttccagtcaggtcagtgactggagagctccatggaaagtctctcagtgacctggctgctggcaccatggactcagaaaagaaacgctttactgaagaggccaccaaatacttccgggagagagtcagcccagtgcatctgcaaatcctgctgactaacaatgaagcctggaagagattcgtgactgcggctgaattgcccagggatgaggcagatgctctctacgaagctctgaagaagcttagaacatatgcagctattgaggacgaatatgtgcagcagaaagatgagcagtttagggaatggtttttgaaagagtttccccaagtcaagaggaagatccaggagtccatagaaaagcttcgtgcccttgcaaatggtattgaagaggtccacagaggctgcaccatctccaatgtggtgtccagctccactggcgctgcctctggcatcatgtcccttgctggtcttgttttggcaccatttacagcagggacgagtctggcccttactgcagctggggtagggctgggagcagcgtctgctgtgactgggatcaccaccagcatcgtggagcactcatacacatcatcagcagaagctgaagccagcaggctgactgcaaccagcattgaccgattgaaggtatttaaggaagttatgcgtgacatcacacccaacttactttcccttcttaataattattacgaagccacacaaaccattgggagtgaaatccgtgccatcaggcaagccagagccagggcccgactccctgtgaccacctggcgaatctcagctggaagtggtggtcaagcagagagaacgattgcaggcaccacccgggcagtgagcagaggagcccggatcctgagtgcgaccacttcaggcatcttccttgcactggatgtggtcaaccttgtatacgagtcaaagcacttgcatgagggggcaaagtctgcatctgctgaggagctgaggcggcaggctcaggagctggaggagaatctaatggagctcactcagatctatcagcgtctgaatccatgccatacccactgaccccagaccagtgcagccagcaggggaggtgagccatacacaggccacgacaaaatgcaggcattttattagggggataaagagggcaaggtaaagtttatggagctgagtgttagtgactttggcatttctgtagctgagcacagcaggggaggggttaatgcagatggcaagtgcaccaaggagaaggcaggaatgctggagcctggaataagggaggagaggggactggagagtgtggggaataggaagaagaaatttcctttagactaacgaatatattggggggaggaatagaggggaggtgtgcaggaaccagcaatgagaaggccaggaaaagaaagagctgaaaatgcagaaagccgaagagttagaacttttggatacagcagaagaaacagcggctccactaccgacctgcccccggttcgatgtccttccaagaatgaagtctttccctggtgatggtcccctgccctgtctttccagcatccactctgtcttgtcctcctggaagtgtatctcagtcagccagtggcttcttgatgatggcggtggaggtggtggttgtagtgtgatggatcccctttaggttatttaggggtatatgtcccctgcttgaaccctgaaggccaggtaatgagccatggccattgtccccagctgaggaccaggtgtctctaaaaacccaaacatcctggagagtatgcgagaacctaccaagaaaaacagtctcattactcatatacagcaggcaaagagacagaaaattaactgaaaagcagtttagagactgggggaggccggatctctagagccatcctgctgagtgccctgtgtgtaagtcctaataaactcacctactcaccaag

SEQ ID NO: 10446 - protein, 331 aa, Homo sapiens; identical to SEQ ID NO: 1309

SEQ ID NO: 10447 - DNA, 2205 bp, Homo sapiens
attatgcagatgcacggctggaggtgggatccacacagctcagaacagctggatcttgctcacactctttcaagagaagcttccttgagatgagcatctagatagcaaggaaaaacattcaatccctcaactgaaagtgaaactgaagctgggccatgttgtccagaggctggttgcttttagtccaagtgctgcctcccacacctcggatttcagccaggctgtgccacggagggcagaggccacccagggttaagaaaaaaaacgaacccttccagtcaggtcagtgactggagagctccatggaaagtctctcagtgacctggctgctggcaccatggactcagaaaagaaacgctttactgaagaggccaccaaatacttccgggagagagtcagcccagtgcatctgcaaatcctgctgactaacaatgaagcctggaagagattcgtgactgcggctgaattgcccagggatgaggcagatgctctctacgaagctctgaagaagcttagaacatatgcagctattgaggacgaatatgtgcagcagaaagatgagcagtttagggaatggtttttgaaagagtttccccaagtcaagaggaagatccaggagtccatagaaaagcttcgtgcccttgcaaatggtattgaagaggtccacagaggctgcaccatctccaatgtggtgtccagctccactggcgctgcctctggcatcatgtcccttgctggtcttgttttggcaccatttacagcagggacgagtctggcccttactgcagctggggtagggctgggagcagcgtctgctgtgactgggatcaccaccagcatcgtggagcactcatacacatcatcagcagaagctgaagccagcaggctgactgcaaccagcattgaccgattgaaggtatttaaggaagttatgcgtgacatcacacccaacttactttcccttcttaataattattacgaagccacacaaaccattgggagtgaaatccgtgccatcaggcaagccagagccagggcccgactccctgtgaccacctggcgaatctcagctggaagtggtggtcaagcagagagaacgattgcaggcaccacccgggcagtgagcagaggagcccggatcctgagtgcgaccacttcaggcatcttccttgcactggatgtggtcaaccttgtatacgagtcaaagcacttgcatgagggggcaaagtctgcatctgctgaggagctgaggcggcaggctcaggagctggaggagaatctaatggagctcactcagatctatcagcgtctgaatccatgccatacccactgaccccagaccagtgcagccagcaggggaggtgagccatacacaggccacgacaaaatgcaggcattttattagggggataaagagggcaaggtaaagtttatggagctgagtgttagtgactttggcatttctgtagctgagcacagcaggggaggggttaatgcagatggcaagtgcaccaaggagaaggcaggaatgctggagcctggaataagggaggagaggggactggagagtgtggggaataggaagaagaaatttcctttagactaacgaatatattggggggaggaatagaggggaggtgtgcaggaaccagcaatgagaaggccaggaaaagaaagagctgaaaatgcagaaagccgaagagttagaacttttggatacagcagaagaaacagcggctccactaccgacctgcccccggttcgatgtccttccaagaatgaagtctttccctggtgatggtcccctgccctgtctttccagcatccactctgtcttgtcctcctggaagtgtatctcagtcagccagtggcttcttgatgatggcggtggaggtggtggttgtagtgtgatggatcccctttaggttatttaggggtatatgtcccctgcttgaaccctgaaggccaggtaatgagccatggccattgtccccagctgaggaccaggtgtctctaaaaacccaaacatcctggagagtatgcgagaacctaccaagaaaaacagtctcattactcatatacagcaggcaaagagacagaaaattaactgaaaagcagtttagagactgggggaggccggatctctagagccatcctgctgagtgccctgtgtgtaagtcctaataaactcacctactcaccaag

SEQ ID NO: 10448 - protein, 331 aa, Homo sapiens; identical to SEQ ID NO: 1309

SEQ ID NO: 10449 - DNA, 1858 bp, Homo sapiens
attatgcagatgcacggctggaggtgggatccacacagctcagaacagctggatcttgctcacactctttcaagagaagcttccttgaaaagaaacgctttactgaagaggccaccaaatacttcagggatgaggcagatgctctctacgaagctctgaagaagcttagaacatatgcagctattgaggacgaatatgtgcagcagaaagatgagcagtttagggaatggtttttgaaagagtttccccaagtcaagaggaagatccaggagtccatagaaaagcttcgtgcccttgcaaatggtattgaagaggtccacagaggctgcaccatctccaatgtggtgtccagctccactggcgctgcctctggcatcatgtcccttgctggtcttgttttggcaccatttacagcagggacgagtctggcccttactgcagctggggtagggctgggagcagcgtctgctgtgactgggatcaccaccagcatcgtggagcactcatacacatcatcagcagaagctgaagccagcaggctgactgcaaccagcattgaccgattgaaggtatttaaggaagttatgcgtgacatcacacccaacttactttcccttcttaataattattacgaagccacacaaaccattgggagtgaaatccgtgccatcaggcaagccagagccagggcccgactccctgtgaccacctggcgaatctcagctggaagtggtggtcaagcagagagaacgattgcaggcaccacccgggcagtgagcagaggagcccggatcctgagtgcgaccacttcaggcatcttccttgcactggatgtggtcaaccttgtatacgagtcaaagcacttgcatgagggggcaaagtctgcatctgctgaggagctgaggcggcaggctcaggagctggaggagaatctaatggagctcactcagatctatcagcgtctgaatccatgccatacccactgaccccagaccagtgcagccagcaggggaggtgagccatacacaggccacgacaaaatgcaggcattttattagggggataaagagggcaaggtaaagtttatggagctgagtgttagtgactttggcatttctgtagctgagcacagcaggggaggggttaatgcagatggcaagtgcaccaaggagaaggcaggaatgctggagcctggaataagggaggagaggggactggagagtgtggggaataggaagaagaaatttcctttagactaacgaatatattggggggaggaatagaggggaggtgtgcaggaaccagcaatgagaaggccaggaaaagaaagagctgaaaatgcagaaagccgaagagttagaacttttggatacagcagaagaaacagcggctccactaccgacctgcccccggttcgatgtccttccaagaatgaagtctttccctggtgatggtcccctgccctgtctttccagcatccactctgtcttgtcctcctggaagtgtatctcagtcagccagtggcttcttgatgatggcggtggaggtggtggttgtagtgtgatggatcccctttaggttatttaggggtatatgtcccctgcttgaaccctgaaggccaggtaatgagccatggccattgtccccagctgaggaccaggtgtctctaaaaacccaaacatcctggagagtatgcgagaacctaccaagaaaaacagtctcattactcatatacagcaggcaaagagacagaaaattaactgaaaagcagtttagagactgggggaggccggatctctagagccatcctgctgagtgccctgtgtgtaagtcctaataaactcacctactcaccaag

SEQ ID NO: 10450 - protein, 51 aa, Homo sapiens; identical to SEQ ID NO: 10408

SEQ ID NO: 10451 - DNA, 2065 bp, Homo sapiens
attatgcagatgcacggctggaggtgggatccacacagctcagaacagctggatcttgctcacactctttcaagagaagcttccttggacaaaaggaccctgccttggtgtgagagtgagggcagagggagctggagcaagtagaatttctctaaataccagctggctggggcccaggagattaaaaaacaccgggctaggttggtcttggcatttgctgacacgcaaagggattgcagagatccagcccctccaacctccctctgtccacaggtggctcacattcagtcccacaatttgctttctcctcctcaagggttaagaaaaaaaacgaacccttccagtcaggtcagtgactggagagctccatggaaagtctctcagtgacctggctgctggcaccatggactcagaaagatgagcagtttagggaatggtttttgaaagagtttccccaagtcaagaggaagatccaggagtccatagaaaagcttcgtgcccttgcaaatggtattgaagaggtccacagaggctgcaccatctccaatgtggtgtccagctccactggcgctgcctctggcatcatgtcccttgctggtcttgttttggcaccatttacagcagggacgagtctggcccttactgcagctggggtagggctgggagcagcgtctgctgtgactgggatcaccaccagcatcgtggagcactcatacacatcatcagcagaagctgaagccagcaggctgactgcaaccagcattgaccgattgaaggtatttaaggaagttatgcgtgacatcacacccaacttactttcccttcttaataattattacgaagccacacaaaccattgggagtgaaatccgtgccatcaggcaagccagagccagggcccgactccctgtgaccacctggcgaatctcagctggaagtggtggtcaagcagagagaacgattgcaggcaccacccgggcagtgagcagaggagcccggatcctgagtgcgaccacttcaggcatcttccttgcactggatgtggtcaaccttgtatacgagtcaaagcacttgcatgagggggcaaagtctgcatctgctgaggagctgaggcggcaggctcaggagctggaggagaatctaatggagctcactcagatctatcagcgtctgaatccatgccatacccactgaccccagaccagtgcagccagcaggggaggtgagccatacacaggccacgacaaaatgcaggcattttattagggggataaagagggcaaggtaaagtttatggagctgagtgttagtgactttggcatttctgtagctgagcacagcaggggaggggttaatgcagatggcaagtgcaccaaggagaaggcaggaatgctggagcctggaataagggaggagaggggactggagagtgtggggaataggaagaagaaatttcctttagactaacgaatatattggggggaggaatagaggggaggtgtgcaggaaccagcaatgagaaggccaggaaaagaaagagctgaaaatgcagaaagccgaagagttagaacttttggatacagcagaagaaacagcggctccactaccgacctgcccccggttcgatgtccttccaagaatgaagtctttccctggtgatggtcccctgccctgtctttccagcatccactctgtcttgtcctcctggaagtgtatctcagtcagccagtggcttcttgatgatggcggtggaggtggtggttgtagtgtgatggatcccctttaggttatttaggggtatatgtcccctgcttgaaccctgaaggccaggtaatgagccatggccattgtccccagctgaggaccaggtgtctctaaaaacccaaacatcctggagagtatgcgagaacctaccaagaaaaacagtctcattactcatatacagcaggcaaagagacagaaaattaactgaaaagcagtttagagactgggggaggccggatctctagagccatcctgctgagtgccctgtgtgtaagtcctaataaactcacctactcaccaag

SEQ ID NO: 10452 - protein, 274 aa, Homo sapiens; identical to SEQ ID NO: 10410

SEQ ID NO: 10453 - DNA, 1873 bp, Homo sapiens
actttcccttttgggttccagggtatatctcagagcctggagaacgtgtctggttattatgcagatgcacggctggaggtgggatccacacagctcagaacagctggatcttgctcacactctttcaagagaagcttccttgggatgaggcagatgctctctacgaagctctgaagaagcttagaacatatgcagctattgaggacgaatatgtgcagcagaaagatgagcagtttagggaatggtttttgaaagagtttccccaagtcaagaggaagatccaggagtccatagaaaagcttcgtgcccttgcaaatggtattgaagaggtccacagaggctgcaccatctccaatgtggtgtccagctccactggcgctgcctctggcatcatgtcccttgctggtcttgttttggcaccatttacagcagggacgagtctggcccttactgcagctggggtagggctgggagcagcgtctgctgtgactgggatcaccaccagcatcgtggagcactcatacacatcatcagcagaagctgaagccagcaggctgactgcaaccagcattgaccgattgaaggtatttaaggaagttatgcgtgacatcacacccaacttactttcccttcttaataattattacgaagccacacaaaccattgggagtgaaatccgtgccatcaggcaagccagagccagggcccgactccctgtgaccacctggcgaatctcagctggaagtggtggtcaagcagagagaacgattgcaggcaccacccgggcagtgagcagaggagcccggatcctgagtgcgaccacttcaggcatcttccttgcactggatgtggtcaaccttgtatacgagtcaaagcacttgcatgagggggcaaagtctgcatctgctgaggagctgaggcggcaggctcaggagctggaggagaatctaatggagctcactcagatctatcagcgtctgaatccatgccatacccactgaccccagaccagtgcagccagcaggggaggtgagccatacacaggccacgacaaaatgcaggcattttattagggggataaagagggcaaggtaaagtttatggagctgagtgttagtgactttggcatttctgtagctgagcacagcaggggaggggttaatgcagatggcaagtgcaccaaggagaaggcaggaatgctggagcctggaataagggaggagaggggactggagagtgtggggaataggaagaagaaatttcctttagactaacgaatatattggggggaggaatagaggggaggtgtgcaggaaccagcaatgagaaggccaggaaaagaaagagctgaaaatgcagaaagccgaagagttagaacttttggatacagcagaagaaacagcggctccactaccgacctgcccccggttcgatgtccttccaagaatgaagtctttccctggtgatggtcccctgccctgtctttccagcatccactctgtcttgtcctcctggaagtgtatctcagtcagccagtggcttcttgatgatggcggtggaggtggtggttgtagtgtgatggatcccctttaggttatttaggggtatatgtcccctgcttgaaccctgaaggccaggtaatgagccatggccattgtccccagctgaggaccaggtgtctctaaaaacccaaacatcctggagagtatgcgagaacctaccaagaaaaacagtctcattactcatatacagcaggcaaagagacagaaaattaactgaaaagcagtttagagactgggggaggccggatctctagagccatcctgctgagtgccctgtgtgtaagtcctaataaactcacctactcaccaag

SEQ ID NO: 10454 - protein, 202 aa, Homo sapiens; identical to SEQ ID NO: 1317

SEQ ID NO: 10455 - DNA, 1965 bp, Homo sapiens
actttcactttcccttttgggttccagggtatatctcagagcctggagaacgtgtctggttattatgcagatgcacggctggaggtgggatccacacagctcagaacagctggatcttgctcacactctttcaagagaagcttccttgggttaagaaaaaaaacgaacccttccagtcaggtcagtgactggagagctccatggaaagtctctcagtgacctggctgctggcaccatggactcagaaaagaaacgctttactgaagaggccaccaaatacttccgggagagagtcagcccagtgcatctgcaaatcctgctgactaacaatgaagcctggaagagattcgtgactgcggctgaattgcccagggatgaggcagatgctctctacgaagctctgaagaagcttagaacatatgcagctattgaggacgaatatgtgcagcagaaagatgagcagtttagggaatggtttttgaaagagtttccccaagtcaagaggaagatccaggagtccatagaaaagcttcgtgcccttactgcagctggggtagggctgggagcagcgtctgctgtgactgggatcaccaccagcatcgtggagcactcatacacatcatcagcagaagctgaagccagcaggctgactgcaaccagcattgaccgattgaaggtatttaaggaagttatgcgtgacatcacacccaacttactttcccttcttaataattattacgaagccacacaaaccattgggagtgaaatccgtgccatcaggcaagccagagccagggcccgactccctgtgaccacctggcgaatctcagctggaagtggtggtcaagcagagagaacgattgcaggcaccacccgggcagtgagcagaggagcccggatcctgagtgcgaccacttcaggcatcttccttgcactggatgtggtcaaccttgtatacgagtcaaagcacttgcatgagggggcaaagtctgcatctgctgaggagctgaggcggcaggctcaggagctggaggagaatctaatggagctcactcagatctatcagcgtctgaatccatgccatacccactgaccccagaccagtgcagccagcaggggaggtgagccatacacaggccacgacaaaatgcaggcattttattagggggataaagagggcaaggtaaagtttatggagctgagtgttagtgactttggcatttctgtagctgagcacagcaggggaggggttaatgcagatggcaagtgcaccaaggagaaggcaggaatgctggagcctggaataagggaggagaggggactggagagtgtggggaataggaagaagaaatttcctttagactaacgaatatattggggggaggaatagaggggaggtgtgcaggaaccagcaatgagaaggccaggaaaagaaagagctgaaaatgcagaaagccgaagagttagaacttttggatacagcagaagaaacagcggctccactaccgacctgcccccggttcgatgtccttccaagaatgaagtctttccctggtgatggtcccctgccctgtctttccagcatccactctgtcttgtcctcctggaagtgtatctcagtcagccagtggcttcttgatgatggcggtggaggtggtggttgtagtgtgatggatcccctttaggttatttaggggtatatgtcccctgcttgaaccctgaaggccaggtaatgagccatggccattgtccccagctgaggaccaggtgtctctaaaaacccaaacatcctggagagtatgcgagaacctaccaagaaaaacagtctcattactcatatacagcaggcaaagagacagaaaattaactgaaaagcagtttagagactgggggaggccggatctctagagccatcctgctgagtgccctgtgtgtaagtcctaataaactcacctactcaccaag

SEQ ID NO: 10456 - protein, 285 aa, Homo sapiens; identical to SEQ ID NO: 10416

SEQ ID NO: 10457 - DNA, 2018 bp, Homo sapiens
gtgactttcactttcccttttgggttccagggtatatctcagagcctggagaacgtgtctggttattatgcagatgcacggctggaggtgggatccacacagctcagaacagctggatcttgctcacactctttcaagagaagcttccttgggttaagaaaaaaaacgaacccttccagtcaggtcagtgactggagagctccatggaaagtctctcagtgacctggctgctggcaccatggactcagaaaagaaacgctttactgaagaggccaccaaatacttccgggagagagtcagcccagtgcatctgcaaatcctgctgactaacaatgaagcctggaagagattcgtgactgcggctgaattgcccagggatgaggcagatgctctctacgaagctctgaagaagcttagaacatatgcagctattgaggacgaatatgtgcagcagaaagatgagcagtttagggaatggtttttgaaagagtttccccaagtcaagaggaagatccaggagtccatagaaaagcttccatgtcccttgctggtcttgttttggcaccatttacagcagggacgagtctggcccttactgcagctggggtagggctgggagcagcgtctgctgtgactgggatcaccaccagcatcgtggagcactcatacacatcatcagcagaagctgaagccagcaggctgactgcaaccagcattgaccgattgaaggtatttaaggaagttatgcgtgacatcacacccaacttactttcccttcttaataattattacgaagccacacaaaccattgggagtgaaatccgtgccatcaggcaagccagagccagggcccgactccctgtgaccacctggcgaatctcagctggaagtggtggtcaagcagagagaacgattgcaggcaccacccgggcagtgagcagaggagcccggatcctgagtgcgaccacttcaggcatcttccttgcactggatgtggtcaaccttgtatacgagtcaaagcacttgcatgagggggcaaagtctgcatctgctgaggagctgaggcggcaggctcaggagctggaggagaatctaatggagctcactcagatctatcagcgtctgaatccatgccatacccactgaccccagaccagtgcagccagcaggggaggtgagccatacacaggccacgacaaaatgcaggcattttattagggggataaagagggcaaggtaaagtttatggagctgagtgttagtgactttggcatttctgtagctgagcacagcaggggaggggttaatgcagatggcaagtgcaccaaggagaaggcaggaatgctggagcctggaataagggaggagaggggactggagagtgtggggaataggaagaagaaatttcctttagactaacgaatatattggggggaggaatagaggggaggtgtgcaggaaccagcaatgagaaggccaggaaaagaaagagctgaaaatgcagaaagccgaagagttagaacttttggatacagcagaagaaacagcggctccactaccgacctgcccccggttcgatgtccttccaagaatgaagtctttccctggtgatggtcccctgccctgtctttccagcatccactctgtcttgtcctcctggaagtgtatctcagtcagccagtggcttcttgatgatggcggtggaggtggtggttgtagtgtgatggatcccctttaggttatttaggggtatatgtcccctgcttgaaccctgaaggccaggtaatgagccatggccattgtccccagctgaggaccaggtgtctctaaaaacccaaacatcctggagagtatgcgagaacctaccaagaaaaacagtctcattactcatatacagcaggcaaagagacagaaaattaactgaaaagcagtttagagactgggggaggccggatctctagagccatcctgctgagtgccctgtgtgtaagtcctaataaactcacctactcaccaag

SEQ ID NO: 10458 - protein, 223 aa, Homo sapiens; identical to SEQ ID NO: 10418

SEQ ID NO: 10459 - DNA, 2329 bp, Homo sapiens
agcaggagggtgggaccaagggtgctgctggaccaaggatgggactgggccaagggtggggctgggaagcatcctgttttgcatgtttgatcaggagctgctgccaagttgtgactttcactttcccttttgggttccagggtatatctcagagcctggagaacgtgtctggttattatgcagatgcacggctggaggtgggatccacacagctcagaacagctggatcttgctcacactctttcaagagaagcttccttggacaaaaggaccctgccttggtgtgagagtgagggcagagggagctggagcaagtagaatttctctaaataccagctggctggggcccaggagattaaaaaacaccgggctagggttaagaaaaaaaacgaacccttccagtcaggtcagtgactggagagctccatggaaagtctctcagtgacctggctgctggcaccatggactcagaaaagaaacgctttactgaagaggccaccaaatacttccgggagagagtcagcccagtgcatctgcaaatcctgctgactaacaatgaagcctggaagagattcgtgactgcggctgaattgcccagggatgaggcagatgctctctacgaagctctgaagaagcttagaacatatgcagctattgaggacgaatatgtgcagcagaaagatgagcagtttagggaatggtttttgaaagagtttccccaagtcaagaggaagatccaggagtccatagaaaagcttcgtgcccttgcaaatggtattgaagaggtccacagaggctgcaccatctccaatgtggtgtccagctccactggcgctgcctctggcatcatgtcccttgctggtcttgttttggcaccatttacagcagggacgagtctggcccttactgcagctggggtagggctgggagcagcgtctgctgtgactgggatcaccaccagcatcgtggagcactcatacacatcatcagcagaagctgaagccagcaggctgactgcaaccagcattgaccgattgaaggtatttaaggaagttatgcgtgacatcacacccaacttactttcccttcttaataattattacgaagccacacaaaccattgggagtgaaatccgtgccatcaggcaagccagagccagggcccgactccctgtgaccacctggcgaatctcagctggaagtggtggtcaagcagagagaacgattgcaggcaccacccgggcagtgagcagaggagcccggatcctgagtgcgaccacttcaggcatcttccttgcactggatgtggtcaaccttgtatacgagtcaaagcacttgcatgagggggcaaagtctgcatctgctgaggagctgaggcggcaggctcaggagctggaggagaatctaatggagctcactcagatctatcagcgtctgaatccatgccatacccactgaccccagaccagtgcagccagcaggggaggtgagccatacacaggccacgacaaaatgcaggcattttattagggggataaagagggcaaggtaaagtttatggagctgagtgttagtgactttggcatttctgtagctgagcacagcaggggaggggttaatgcagatggcaagtgcaccaaggagaaggcaggaatgctggagcctggaataagggaggagaggggactggagagtgtggggaataggaagaagaaatttcctttagactaacgaatatattggggggaggaatagaggggaggtgtgcaggaaccagcaatgagaaggccaggaaaagaaagagctgaaaatgcagaaagccgaagagttagaacttttggatacagcagaagaaacagcggctccactaccgacctgcccccggttcgatgtccttccaagaatgaagtctttccctggtgatggtcccctgccctgtctttccagcatccactctgtcttgtcctcctggaagtgtatctcagtcagccagtggcttcttgatgatggcggtggaggtggtggttgtagtgtgatggatcccctttaggttatttaggggtatatgtcccctgcttgaaccctgaaggccaggtaatgagccatggccattgtccccagctgaggaccaggtgtctctaaaaacccaaacatcctggagagtatgcgagaacctaccaagaaaaacagtctcattactcatatacagcaggcaaagagacagaaaattaactgaaaagcagtttagagactgggggaggccggatctctagagccatcctgctgagtgccctgtgtgtaagtcctaataaactcacctactcaccaag

SEQ ID NO: 10460 - protein, 331 aa, Homo sapiens; identical to SEQ ID NO: 1309

SEQ ID NO: 10461 - DNA, 2445 bp, Homo sapiens
agcaggagggtgggaccaagggtgctgctggaccaaggatgggactgggccaagggtggggctgggaagcatcctgttttgcatgtttgatcaggagctgctgccaagttgtgactttcactttcccttttgggttccagggtatatctcagagcctggagaacgtgtctggttattatgcagatgcacggctggaggtgggatccacacagctcagaacagctggatcttgctcacactctttcaagagaagcttccttggacaaaaggaccctgccttggtgtgagagtgagggcagagggagctggagcaagtagaatttctctaaataccagctggctggggcccaggagattaaaaaacaccgggctaggttggtcttggcatttgctgacacgcaaagggattgcagagatccagcccctccaacctccctctgtccacaggtggctcacattcagtcccacaatttgctttctcctcctcaagggttaagaaaaaaaacgaacccttccagtcaggtcagtgactggagagctccatggaaagtctctcagtgacctggctgctggcaccatggactcagaaaagaaacgctttactgaagaggccaccaaatacttccgggagagagtcagcccagtgcatctgcaaatcctgctgactaacaatgaagcctggaagagattcgtgactgcggctgaattgcccagggatgaggcagatgctctctacgaagctctgaagaagcttagaacatatgcagctattgaggacgaatatgtgcagcagaaagatgagcagtttagggaatggtttttgaaagagtttccccaagtcaagaggaagatccaggagtccatagaaaagcttcgtgcccttgcaaatggtattgaagaggtccacagaggctgcaccatctccaatgtggtgtccagctccactggcgctgcctctggcatcatgtcccttgctggtcttgttttggcaccatttacagcagggacgagtctggcccttactgcagctggggtagggctgggagcagcgtctgctgtgactgggatcaccaccagcatcgtggagcactcatacacatcatcagcagaagctgaagccagcaggctgactgcaaccagcattgaccgattgaaggtatttaaggaagttatgcgtgacatcacacccaacttactttcccttcttaataattattacgaagccacacaaaccattgggagtgaaatccgtgccatcaggcaagccagagccagggcccgactccctgtgaccacctggcgaatctcagctggaagtggtggtcaagcagagagaacgattgcaggcaccacccgggcagtgagcagaggagcccggatcctgagtgcgaccacttcaggcatcttccttgcactggatgtggtcaaccttgtatacgagtcaaagcacttgcatgagggggcaaagtctgcatctgctgaggagctgaggcggcaggctcaggagctggaggagaatctaatggagctcactcagatctatcagcgtctgaatccatgccatacccactgaccccagaccagtgcagccagcaggggaggtgagccatacacaggccacgacaaaatgcaggcattttattagggggataaagagggcaaggtaaagtttatggagctgagtgttagtgactttggcatttctgtagctgagcacagcaggggaggggttaatgcagatggcaagtgcaccaaggagaaggcaggaatgctggagcctggaataagggaggagaggggactggagagtgtggggaataggaagaagaaatttcctttagactaacgaatatattggggggaggaatagaggggaggtgtgcaggaaccagcaatgagaaggccaggaaaagaaagagctgaaaatgcagaaagccgaagagttagaacttttggatacagcagaagaaacagcggctccactaccgacctgcccccggttcgatgtccttccaagaatgaagtctttccctggtgatggtcccctgccctgtctttccagcatccactctgtcttgtcctcctggaagtgtatctcagtcagccagtggcttcttgatgatggcggtggaggtggtggttgtagtgtgatggatcccctttaggttatttaggggtatatgtcccctgcttgaaccctgaaggccaggtaatgagccatggccattgtccccagctgaggaccaggtgtctctaaaaacccaaacatcctggagagtatgcgagaacctaccaagaaaaacagtctcattactcatatacagcaggcaaagagacagaaaattaactgaaaagcagtttagagactgggggaggccggatctctagagccatcctgctgagtgccctgtgtgtaagtcctaataaactcacctactcaccaag

SEQ ID NO: 10462 - protein, 331 aa, Homo sapiens; identical to SEQ ID NO: 1309

SEQ ID NO: 10463 - DNA, 2119 bp, Homo sapiens
agcaggagggtgggaccaagggtgctgctggaccaaggatgggactgggccaagggtggggctgggaagcatcctgttttgcatgtttgatcaggagctgctgccaagttgtgactttcactttcccttttgggttccagggtatatctcagagcctggagaacgtgtctggttattatgcagatgcacggctggaggtgggatccacacagctcagaacagctggatcttgctcacactctttcaagagaagcttccttgaaaagaaacgctttactgaagaggccaccaaatacttccgggagagagtcagcccagtgcatctgcaaatcctgctgactaacaatgaagcctggaagagattcgtgactgcggctgaattgcccagggatgaggcagatgctctctacgaagctctgaagaagcttagaacatatgcagctattgaggacgaatatgtgcagcagaaagatgagcagtttagggaatggtttttgaaagagtttccccaagtcaagaggaagatccaggagtccatagaaaagcttcgtgcccttgcaaatggtattgaagaggtccacagaggctgcaccatctccaatgtggtgtccagctccactggcgctgcctctggcatcatgtcccttgctggtcttgttttggcaccatttacagcagggacgagtctggcccttactgcagctggggtagggctgggagcagcgtctgctgtgactgggatcaccaccagcatcgtggagcactcatacacatcatcagcagaagctgaagccagcaggctgactgcaaccagcattgaccgattgaaggtatttaaggaagttatgcgtgacatcacacccaacttactttcccttcttaataattattacgaagccacacaaaccattgggagtgaaatccgtgccatcaggcaagccagagccagggcccgactccctgtgaccacctggcgaatctcagctggaagtggtggtcaagcagagagaacgattgcaggcaccacccgggcagtgagcagaggagcccggatcctgagtgcgaccacttcaggcatcttccttgcactggatgtggtcaaccttgtatacgagtcaaagcacttgcatgagggggcaaagtctgcatctgctgaggagctgaggcggcaggctcaggagctggaggagaatctaatggagctcactcagatctatcagcgtctgaatccatgccatacccactgaccccagaccagtgcagccagcaggggaggtgagccatacacaggccacgacaaaatgcaggcattttattagggggataaagagggcaaggtaaagtttatggagctgagtgttagtgactttggcatttctgtagctgagcacagcaggggaggggttaatgcagatggcaagtgcaccaaggagaaggcaggaatgctggagcctggaataagggaggagaggggactggagagtgtggggaataggaagaagaaatttcctttagactaacgaatatattggggggaggaatagaggggaggtgtgcaggaaccagcaatgagaaggccaggaaaagaaagagctgaaaatgcagaaagccgaagagttagaacttttggatacagcagaagaaacagcggctccactaccgacctgcccccggttcgatgtccttccaagaatgaagtctttccctggtgatggtcccctgccctgtctttccagcatccactctgtcttgtcctcctggaagtgtatctcagtcagccagtggcttcttgatgatggcggtggaggtggtggttgtagtgtgatggatcccctttaggttatttaggggtatatgtcccctgcttgaaccctgaaggccaggtaatgagccatggccattgtccccagctgaggaccaggtgtctctaaaaacccaaacatcctggagagtatgcgagaacctaccaagaaaaacagtctcattactcatatacagcaggcaaagagacagaaaattaactgaaaagcagtttagagactgggggaggccggatctctagagccatcctgctgagtgccctgtgtgtaagtcctaataaactcacctactcaccaag

SEQ ID NO: 10464 - protein, 402 aa, Homo sapiens; identical to SEQ ID NO: 1315

SEQ ID NO: 10465 - DNA, 3628 bp, Homo sapiens
actctggggaaaggagggtacaaccacatgtaaattttattataatgatggtataatgaacttggggtgacctgagggcatgtttttgtgttactgggcatgtgcccctttaggagacttccacctgtgccttactttctctttctttgggatgtgctggccacagactttaccaaaaactccatccattaggatggcattaggacggttctggggctaaacttaggtgggccaggggctgtttcactgtcagcctttctactctcttttcttacccactcctagctgctaatgtctatttaactacctaatatttccccctttagagaaaaaaagccaaatttttgggtagatcggtgacaattaatctggctacttcctgctgacaagaggcagtggtaataattgggttctcttttttgctctcttgtagctggtaggttgggcagagaaaagtggtggccatccaaggggcccacgtagatatcagacatggttgagacctcgcggtaaccttgtgtagaatcatttggagttttatggattctaggtgggaagaaacaaaacaaccttgtaaatcaaatgagcatcgtttgaaagctataagttgtataaagctgttttaggaccaagaaagggggctaaccaggaaaaccaggaccagttgttaaatttccaccagtcaaagcctcctgaaactctgttttccattaacttgttggccctgtctgtaatttttttaagttggtttgcactttacctgattggttgatgaaaacagcaatgtttatcaagtgttgcacaagctcccccttgattggctgtgagcaaattaaaagctcatcaatttcataagactatgcttgctaatgaagcaatttgttctgaaagggtattgacctggttagttagattaataatttgttgagtaatttttaagaagagtttctgggcagtaaaaatggagttaaggaggtcctccagttcccgtgccaataccagccagaacgccaattatagtcagtgctgttaaaactcctctttcagttttaccagattgagcgtgtatagggaggggaatgctatcgataagagtgagtttggggatgatgtaaactagggccaaatccccgtttaattagcagacaagcagagatatgccttgtttctatacaaaaatgtgatttgtcatgttaagacaaatatcaacagtgatactaaagtagggtttttccatgctgtgtaagtctgctttaataccctcagaagtggaagtcaaggctagttcatgtaatgggggaacacaggcagtacttgacagaatgaaagaggaatcaaaagcccaattagaggaaggagtgatgggatcccaaccaatattgtgaaattatggggagctgcagttttttgcaatgattttgcccgaagttgtgagactgaaaccagaagttgttatgtttaaaatgatattctggtgtgggtctggggaaaagggtagatccagaatagctggcttctttccacatagtggttctgttggggggcttgggaaatgaataaaacacaaagaagaattagaatatcaggtgaaggtagcaggtgctcctggcagaagaacccacataaggaagtgtccagaagccacacagggtatatctcagagcctggagaacgtgtctggttattatgcagatgcacggctggaggtgggatccacacagctcagaacagctggatcttgctcacactctttcaagagaagcttccttgaaaagaaacgctttactgaagaggccaccaaatacttccgggagagagtcagcccagtgcatctgcaaatcctgctgactaacaatgaagcctggaagagattcgtgactgcggctgaattgcccagggatgaggcagatgctctctacgaagctctgaagaagcttagaacatatgcagctattgaggacgaatatgtgcagcagaaagatgagcagtttagggaatggtttttgaaagagtttccccaagtcaagaggaagatccaggagtccatagaaaagcttcgtgcccttgcaaatggtattgaagaggtccacagaggctgcaccatctccaatgtggtgtccagctccactggcgctgcctctggcatcatgtcccttgctggtcttgttttggcaccatttacagcagggacgagtctggcccttactgcagctggggtagggctgggagcagcgtctgctgtgactgggatcaccaccagcatcgtggagcactcatacacatcatcagcagaagctgaagccagcaggctgactgcaaccagcattgaccgattgaaggtatttaaggaagttatgcgtgacatcacacccaacttactttcccttcttaataattattacgaagccacacaaaccattgggagtgaaatccgtgccatcaggcaagccagagccagggcccgactccctgtgaccacctggcgaatctcagctggaagtggtggtcaagcagagagaacgattgcaggcaccacccgggcagtgagcagaggagcccggatcctgagtgcgaccacttcaggcatcttccttgcactggatgtggtcaaccttgtatacgagtcaaagcacttgcatgagggggcaaagtctgcatctgctgaggagctgaggcggcaggctcaggagctggaggagaatctaatggagctcactcagatctatcagcgtctgaatccatgccatacccactgaccccagaccagtgcagccagcaggggaggtgagccatacacaggccacgacaaaatgcaggcattttattagggggataaagagggcaaggtaaagtttatggagctgagtgttagtgactttggcatttctgtagctgagcacagcaggggaggggttaatgcagatggcaagtgcaccaaggagaaggcaggaatgctggagcctggaataagggaggagaggggactggagagtgtggggaataggaagaagaaatttcctttagactaacgaatatattggggggaggaatagaggggaggtgtgcaggaaccagcaatgagaaggccaggaaaagaaagagctgaaaatgcagaaagccgaagagttagaacttttggatacagcagaagaaacagcggctccactaccgacctgcccccggttcgatgtccttccaagaatgaagtctttccctggtgatggtcccctgccctgtctttccagcatccactctgtcttgtcctcctggaagtgtatctcagtcagccagtggcttcttgatgatggcggtggaggtggtggttgtagtgtgatggatcccctttaggttatttaggggtatatgtcccctgcttgaaccctgaaggccaggtaatgagccatggccattgtccccagctgaggaccaggtgtctctaaaaacccaaacatcctggagagtatgcgagaacctaccaagaaaaacagtctcattactcatatacagcaggcaaagagacagaaaattaactgaaaagcagtttagagactgggggaggccggatctctagagccatcctgctgagtgccctgtgtgtaagtcctaataaactcacctactcaccaag

SEQ ID NO: 10466 - protein, 72 aa, Homo sapiens; identical to SEQ ID NO: 10428

SEQ ID NO: 10467 - DNA, 3565 bp, Homo sapiens
actctggggaaaggagggtacaaccacatgtaaattttattataatgatggtataatgaacttggggtgacctgagggcatgtttttgtgttactgggcatgtgcccctttaggagacttccacctgtgccttactttctctttctttgggatgtgctggccacagactttaccaaaaactccatccattaggatggcattaggacggttctggggctaaacttaggtgggccaggggctgtttcactgtcagcctttctactctcttttcttacccactcctagctgctaatgtctatttaactacctaatatttccccctttagagaaaaaaagccaaatttttgggtagatcggtgacaattaatctggctacttcctgctgacaagaggcagtggtaataattgggttctcttttttgctctcttgtagctggtaggttgggcagagaaaagtggtggccatccaaggggcccacgtagatatcagacatggttgagacctcgcggtaaccttgtgtagaatcatttggagttttatggattctaggtgggaagaaacaaaacaaccttgtaaatcaaatgagcatcgtttgaaagctataagttgtataaagctgttttaggaccaagaaagggggctaaccaggaaaaccaggaccagttgttaaatttccaccagtcaaagcctcctgaaactctgttttccattaacttgttggccctgtctgtaatttttttaagttggtttgcactttacctgattggttgatgaaaacagcaatgtttatcaagtgttgcacaagctcccccttgattggctgtgagcaaattaaaagctcatcaatttcataagactatgcttgctaatgaagcaatttgttctgaaagggtattgacctggttagttagattaataatttgttgagtaatttttaagaagagtttctgggcagtaaaaatggagttaaggaggtcctccagttcccgtgccaataccagccagaacgccaattatagtcagtgctgttaaaactcctctttcagttttaccagattgagcgtgtatagggaggggaatgctatcgataagagtgagtttggggatgatgtaaactagggccaaatccccgtttaattagcagacaagcagagatatgccttgtttctatacaaaaatgtgatttgtcatgttaagacaaatatcaacagtgatactaaagtagggtttttccatgctgtgtaagtctgctttaataccctcagaagtggaagtcaaggctagttcatgtaatgggggaacacaggcagtacttgacagaatgaaagaggaatcaaaagcccaattagaggaaggagtgatgggatcccaaccaatattgtgaaattatggggagctgcagttttttgcaatgattttgcccgaagttgtgagactgaaaccagaagttgttatgtttaaaatgatattctggtgtgggtctggggaaaagggtagatccagaatagctggcttctttccacatagtggttctgttggggggcttgggaaatgaataaaacacaaagaagaattagaatatcagggtatatctcagagcctggagaacgtgtctggttattatgcagatgcacggctggaggtgggatccacacagctcagaacagctggatcttgctcacactctttcaagagaagcttccttgaaaagaaacgctttactgaagaggccaccaaatacttccgggagagagtcagcccagtgcatctgcaaatcctgctgactaacaatgaagcctggaagagattcgtgactgcggctgaattgcccagggatgaggcagatgctctctacgaagctctgaagaagcttagaacatatgcagctattgaggacgaatatgtgcagcagaaagatgagcagtttagggaatggtttttgaaagagtttccccaagtcaagaggaagatccaggagtccatagaaaagcttcgtgcccttgcaaatggtattgaagaggtccacagaggctgcaccatctccaatgtggtgtccagctccactggcgctgcctctggcatcatgtcccttgctggtcttgttttggcaccatttacagcagggacgagtctggcccttactgcagctggggtagggctgggagcagcgtctgctgtgactgggatcaccaccagcatcgtggagcactcatacacatcatcagcagaagctgaagccagcaggctgactgcaaccagcattgaccgattgaaggtatttaaggaagttatgcgtgacatcacacccaacttactttcccttcttaataattattacgaagccacacaaaccattgggagtgaaatccgtgccatcaggcaagccagagccagggcccgactccctgtgaccacctggcgaatctcagctggaagtggtggtcaagcagagagaacgattgcaggcaccacccgggcagtgagcagaggagcccggatcctgagtgcgaccacttcaggcatcttccttgcactggatgtggtcaaccttgtatacgagtcaaagcacttgcatgagggggcaaagtctgcatctgctgaggagctgaggcggcaggctcaggagctggaggagaatctaatggagctcactcagatctatcagcgtctgaatccatgccatacccactgaccccagaccagtgcagccagcaggggaggtgagccatacacaggccacgacaaaatgcaggcattttattagggggataaagagggcaaggtaaagtttatggagctgagtgttagtgactttggcatttctgtagctgagcacagcaggggaggggttaatgcagatggcaagtgcaccaaggagaaggcaggaatgctggagcctggaataagggaggagaggggactggagagtgtggggaataggaagaagaaatttcctttagactaacgaatatattggggggaggaatagaggggaggtgtgcaggaaccagcaatgagaaggccaggaaaagaaagagctgaaaatgcagaaagccgaagagttagaacttttggatacagcagaagaaacagcggctccactaccgacctgcccccggttcgatgtccttccaagaatgaagtctttccctggtgatggtcccctgccctgtctttccagcatccactctgtcttgtcctcctggaagtgtatctcagtcagccagtggcttcttgatgatggcggtggaggtggtggttgtagtgtgatggatcccctttaggttatttaggggtatatgtcccctgcttgaaccctgaaggccaggtaatgagccatggccattgtccccagctgaggaccaggtgtctctaaaaacccaaacatcctggagagtatgcgagaacctaccaagaaaaacagtctcattactcatatacagcaggcaaagagacagaaaattaactgaaaagcagtttagagactgggggaggccggatctctagagccatcctgctgagtgccctgtgtgtaagtcctaataaactcacctactcaccaag

SEQ ID NO: 10468 - protein, 53 aa, Homo sapiens; identical to SEQ ID NO: 10430

SEQ ID NO: 10469 - DNA, 563 bp, Homo sapiens
attatgcagatgcacggctggaggtgggatccacacagctcagaacagctggatcttgctcacactctttcaagagaagcttccttggacaaaaggaccctgccttggtgtgagagtgagggcagagggagctggagcaagtagaatttctctaaataccagctggctggggcccaggagattaaaaaacaccgggctaggttggtcttggcatttgctgacacgcaaagggattgcagagatccagcccctccaacctccctctgtccacaggtggctcacattcagtcccacaatttgctttctcctcctcaagggttaagaaaaaaaacgaacccttccagtcaggtcagtgactggagagctccatggaaagtctctcagtgacctggctgctggcaccatggactcagattttgaagacactggtgtaaagcgtttgacaataggcacatggcagaaggaagcgatcactggaatatttcccgtacatggggagaaagcatggtggaaagctcactttctggtgattctcagctgaaatagatcggttcctccacaaa

SEQ ID NO: 10470 - protein, 46 aa, Homo sapiens
MQMHGWRWDPHSSEQLDLAHTLSREASLDKRTLPWCESEGRGSWSK

SEQ ID NO: 10471 - DNA, 589 bp, Homo sapiens
ttattatgcagatgcacggctggaggtgggatccacacagctcagaacagctggatcttgctcacactctttcaagagaagcttccttgcgtggtggtatgtacctgtagggacaactacttgggaagttgaagcagaagcatcacttgcagccaggacatacaggcagaagcaagggggacaaagggtgtccagcacagcaccagtgaattcaccaagacagacacttgggcatagagtgcaagacacagatttggaatgaggagtcatttacaataagcatgacaaaaggaccctgccttggtgtgagagtgagggcagagggagctggagcaagtagaatttctctaaataccagctggctggggcccaggagattaaaaaacaccgggctaggttggtcttggcatttgctgacacgcaaagggattgcagagatccagcccctccaacctccctctgtccacaggtggctcacattcagtcccacaatttgctttctcctcctcaagggttaagaaaaaaaacgaacccttccagtcaggtcagtgactggagagctccatggaaagtctctcagtgacctggc

SEQ ID NO: 10472 - protein, 78 aa, Homo sapiens [sequence omitted]

SEQ ID NO: 10473 - DNA, 1219 bp, Homo sapiens
ggatttcagccaggctgtgccacggagggcagaggccacccaggaggaggccccacagccacttgcagggagctgctttgctgagagtctctgtcctctgcatctggagagcttggctcagagctgaggcaggagggagggctccctgtctgggcctcctccaggaactaaagtccctttccgggaattgaccaaactgcaggcttgcccagggaggacatgctgtgtcctagttcagctcgaggggcagtatccagcttcaaccctcagcggatgccccagacaagattccgagccaggccaacaacgcctaaggaggacgagaccctgggtgtagctcatcagaggtgtcaggtgtggtctgaggccccagctctctctgccctcctgctcctctgctctgtgctggctcctggtccttatggctcatgatgttgagacagctgccctggcctagggggtcacacactgaacaaagcaggaagaaggggaaggggagccctccttctatcacccttatcccttacagcaagaagcacccagaaacccctcagcacactcccctagtgcctctattggcctcactgtcaccatggttgcatgggggccccagacaatagacacctggatgcaagatccctaagacagaggcaggaaataggaagagggaggtgagaggctttcgatgaggatgcttctacacatgaccttgaggatgaaaacgcatcagggggtcccgggaaccactgcgttgttaacataaagtctgggagcaaagaccagcggctggaatggatgtgcctgggagccagctgaaacagatgcagccgaagccacagtaaagaagaaagagataggggcctgcttggagccaacccctacctttgaggggcctgacagggccacctcacagctgcctgggcttgttgttgcctcctcactacagaaaccatggaagtctctagagtcaatgtttccaggctggggctgccagatcactcctgtaggtggttgaaccagttgagttcattcttctcagtgagggggacacaggtggaggtccatcggcacctccataaggggtgcgagaaggaacctgttagaatatctgggttctggctgggtgattggcaggagggcctatgaaatggagcccactctggattgggtgttgcagaaagtggggggcaagtctaccagtgggtatctcagcaaatct

SEQ ID NO: 10474 - protein, 70 aa, Homo sapiens
MLCPSSARGAVSSFNPQRMPQTRFRARPTTPKEDETLGVAHQRCQVWSEAPALSALLLLCSVLAPGPYGS

SEQ ID NO: 10475 - DNA, 544 bp, Homo sapiens
attatgcagatgcacggctggaggtgggatccacacagctcagaacagctggatcttgctcacactctttcaagagaagcttccttggtaagttaggggtggtctgaccttccccatctccccatcctcacagcagctctataagagaagggtcattcaccttttgtagatgagctcagagaggttaggtaactgactgaggtcacatctcggtccatggcagagcctgaatttgcacccaggttttagctggacttctccctccctctctctgggcccccaaacagtagagacagaggcagaatcagctcagctgggttcacaaagcttcctagggctcagctctagttccagcctgcgtgagacatggcccggtgaccccagaaggaaggcagatgttgggactgtccattcctttagaatatttggaggaaccagagaagtgctgggattacaggcatgagccaccgtgccaggcgcattccttagtcttaatgggcatagtgttagggacccgcctactccctatggcaggagatttagt

SEQ ID NO: 10476 - protein, 48 aa, Homo sapiens
MLGLSIPLEYLEEPEKCWDYRHEPPCQAHSLVLMGIVLGTRLLPMAGD

SEQ ID NO: 10477 - DNA, 538 bp, Homo sapiens
attatgcagatgcacggctggaggtgggatccacacagctcagaacagctggatcttgctcacactctttcaagagaagcttccttggcctctgggtgatagagaagaaagaagctgtgctgttccctagtgggaaagatggcccagacaggggcagtgagaacggcatgttgcagaatggtgtctgccacatgatcccagcttgacaatcatgagattaaaagtcaaactgtggaagcgtgagcataactgtgggagcgtgagcttagccctctgtgtttgtagaagcagaaacaaacctggaagattttggattattaacattatactttcttgcttcaatgtcagagtcaggaggtcaggtgttgaccttccccctgccctccaagaggtgtgtgacactggggaagtcacttcccctctctgagcctcagggtttttcacctgccttagggggttaggatgccctaccctgctgacccccagcaggctgctgaccccatctggggtgaggtgggaggcggggcagtgcgagtca

SEQ ID NO: 10478 - protein, 31 aa, Homo sapiens
MQMHGWRWDPHSSEQLDLAHTLSREASLASG

SEQ ID NO: 10479 - DNA, 288 bp, Homo sapiens
attatgcagatgcacggctggaggtgggatccacacagctcagaacagctggatcttgctcacactctttcaagagaagcttccttggtaagttaggggtggtctgaccttccccatccccaaacagtagagacagaggcagaatcagctcagctgggttcacaaagcttcctagggctcagctctagttccagcctgcgtgagacatggcccggtgaccccagaaggaaggcagatgttgggactgtccattcctttagaatatttggaggaaccagagaaggtgga

SEQ ID NO: 10480 - protein, 30 aa, Homo sapiens
MQMHGWRWDPHSSEQLDLAHTLSREASLVS

SEQ ID NO: 10481 - DNA, 3801 bp, Homo sapiens
gaggaaaggctgtctccacccacctctcgcactctcccttctcctttataaaggccggaacagctgaaagggtggcaacttctcctcctgcagccgggagcggcctgcctgcctccctgcgcacccgcagcctcccccgctgcctccctagggctcccctccggccgccagcgcccatttttcattccctagatagagatactttgcgcgcacacacatacatacgcgcgcaaaaaggaaaaaaaaaaaaaaaagcccaccctccagcctcgctgcaaagagaaaaccggagcagccgcagctcgcagctcgcagctcgcagcccgcagcccgcagaggacgcccagagcggcgagcgggcgggcagacggaccgacggactcgcgccgcgtccacctgtcggccgggcccagccgagcgcgcagcgggcacgccgcgcgcgcggagcagccgtgcccgccgcccgggccccgcgccagggcgcacacgctcccgcccccctacccggcccgggcgggagtttgcacctctccctgcccgggtgctcgagctgccgttgcaaagccaactttggaaaaagttttttgggggagacttgggccttgaggtgcccagctccgcgctttccgattttgggggcctttccagaaaatgttgcaaaaaagctaagccggcgggcagaggaaaacgcctgtagccggcgagtgaagacgaaccatcgactgccgtgttccttttcctcttggaggttggagtcccctgggcgcccccacacggctagacgcctcggctggttcgcgacgcagccccccggccgtggatgctcactcgggctcgggatccgcccaggtagcggcctcggacccaggtcctgcgcccaggtcctcccctgccccccagcgacggagccggggccgggggcggcggcgcccgggggccatgcgggtgagccgcggctgcagaggcctgagcgcctgatcgccgcggacccgagccgagcccacccccctccccagccccccaccctggccgcgggggcggcgcgctcgatctacgcgtccggggccccgcggggccgggcccggagtcggcatgaatcgctgctgggcgctcttcctgtctctctgctgctacctgcgtctggtcagcgccgagggggaccccattcccgaggagctttatgagatgctgagtgaccactcgatccgctcctttgatgatctccaacgcctgctgcacggagaccccggagaggaagatggggccgagttggacctgaacatgacccgctcccactctggaggcgagctggagagcttggctcgtggaagaaggagcctgggttccctgaccattgctgagccggccatgatcgccgagtgcaagacgcgcaccgaggtgttcgagatctcccggcgcctcatagaccgcaccaacgccaacttcctggtgtggccgccctgtgtggaggtgcagcgctgctccggctgctgcaacaaccgcaacgtgcagtgccgccccacccaggtgcagctgcgacctgtccaggtgagaaagatcgagattgtgcggaagaagccaatctttaagaaggccacggtgacgctggaagaccacctggcatgcaagtgtgagacagtggcagctgcacggcctgtgacccgaagcccggggggttcccaggagcagcgagccaaaacgccccaaactcgggtgaccattcggacggtgcgagtccgccggccccccaagggcaagcaccggaaattcaagcacacgcatgacaagacggcactgaaggagacccttggagcctaggggcatcggcaggagagtgtgtgggcagggttatttaatatggtatttgctgtattgcccccatggggtccttggagtgataatattgtttccctcgtccgtctgtctcgatgcctgattcggacggccaatggtgcttcccccacccctccacgtgtccgtccacccttccatcagcgggtctcctcccagcggcctccggcgtcttgcccagcagctcaagaagaaaaagaaggactgaactccatcgccatcttcttcccttaactccaagaacttgggataagagtgtgagagagactgatggggtcgctctttgggggaaacgggctccttcccctgcacctggcctgggccacacctgagcgctgtggactgtcctgaggagccctgaggacctctcagcatagcctgcctgatccctgaacccctggccagctctgaggggaggcacctccaggcaggccaggctgcctcggactccatggctaagaccacagacgggcacacagactggagaaaacccctcccacggtgcccaaacaccagtcacctcgtctccctggtgcctctgtgcacagtggcttcttttcgttttcgttttgaagacgtggactcctcttggtgggtgtggccagcacaccaagtggctgggtgccctctcaggtgggttagagatggagtttgctgttgaggtggctgtagatggtgacctgggtatcccctgcctcctgccaccccttcctccccacactccactctgattcacctcttcctctggttcctttcatctctctacctccaccctgcattttcctcttgtcctggcccttcagtctgctccaccaaggggctcttgaaccccttattaaggccccagatgatcccagtcactcctctctagggcagaagactagaggccagggcagcaagggacctgctcatcatattccaacccagccacgactgccatgtaaggttgtgcagggtgtgtactgcacaaggacattgtatgcagggagcactgttcacatcatagataaagctgatttgtatatttattatgacaatttctggcagatgtaggtaaagaggaaaaggatccttttcctaattcacacaaagactccttgtggactggctgtgcccctgatgcagcctgtggcttggagtggccaaataggagggagactgtggtaggggcagggaggcaacactgctgtccacatgacctccatttcccaaagtcctctgctccagcaactgcccttccaggtgggtgtgggacacctgggagaaggtctccaagggagggtgcagccctcttgcccgcacccctccctgcttgcacacttccccatctttgatccttctgagctccacctctggtggctcctcctaggaaaccagctcgtgggctgggaatgggggagagaagggaaaagatccccaagaccccctggggtgggatctgagctcccacctcccttcccacctactgcactttcccccttcccgccttccaaaacctgcttccttcagtttgtaaagtcggtgattatatttttgggggctttccttttattttttaaatgtaaaatttatttatattccgtatttaaagttgtaaaaaaaaataaccacaaaacaaaaccaaatgaatccgccggaggtctgtctgttggcatcgtgcgtgacaattaacctttctgccttggcaggatgtgccgacagcttgcggcgtgttcctctcactctgggagcctcaggcgtgatctcacacactggcgtgcacatacacacacacacacatacatgctcacacatgcgtgcacatacacgcaggcctgcaacttgggggaggcctctgtctggcgggaagaagagacacacaggctactctgttggtcttggtcctggcacagctcctgacacgtggacttgtgcgtgtctctggcagtgacgagagatgggtttctgcag

SEQ ID NO: 10482 - protein, 241 aa, Homo sapiens; identical to SEQ ID NO: 1321

SEQ ID NO: 10483 - DNA, 2542 bp, Homo sapiens
gtgtgtgtgtgtgtgcgcatctgagagagagagagagagagactgactgagcaggaatggtgagatgtttatcatgggcctcggggaccccattcccgaggagctttatgagatgctgagtgaccactcgatccgctcctttgatgatctccaacgcctgctgcacggagaccccggagaggaagatggggccgagttggacctgaacatgacccgctcccactctggaggcgagctggagagcttggctcgtggaagaaggagcctgggttccctgaccattgctgagccggccatgatcgccgagtgcaagacgcgcaccgaggtgttcgagatctcccggcgcctcatagaccgcaccaacgccaacttcctggtgtggccgccctgtgtggaggtgcagcgctgctccggctgctgcaacaaccgcaacgtgcagtgccgccccacccaggtgcagctgcgacctgtccaggtgagaaagatcgagattgtgcggaagaagccaatctttaagaaggccacggtgacgctggaagaccacctggcatgcaagtgtgagacagtggcagctgcacggcctgtgacccgaagcccggggggttcccaggagcagcgagccaaaacgccccaaactcgggtgaccattcggacggtgcgagtccgccggccccccaagggcaagcaccggaaattcaagcacacgcatgacaagacggcactgaaggagacccttggagcctaggggcatcggcaggagagtgtgtgggcagggttatttaatatggtatttgctgtattgcccccatggggtccttggagtgataatattgtttccctcgtccgtctgtctcgatgcctgattcggacggccaatggtgcttcccccacccctccacgtgtccgtccacccttccatcagcgggtctcctcccagcggcctccggcgtcttgcccagcagctcaagaagaaaaagaaggactgaactccatcgccatcttcttcccttaactccaagaacttgggataagagtgtgagagagactgatggggtcgctctttgggggaaacgggctccttcccctgcacctggcctgggccacacctgagcgctgtggactgtcctgaggagccctgaggacctctcagcatagcctgcctgatccctgaacccctggccagctctgaggggaggcacctccaggcaggccaggctgcctcggactccatggctaagaccacagacgggcacacagactggagaaaacccctcccacggtgcccaaacaccagtcacctcgtctccctggtgcctctgtgcacagtggcttcttttcgttttcgttttgaagacgtggactcctcttggtgggtgtggccagcacaccaagtggctgggtgccctctcaggtgggttagagatggagtttgctgttgaggtggctgtagatggtgacctgggtatcccctgcctcctgccaccccttcctccccacactccactctgattcacctcttcctctggttcctttcatctctctacctccaccctgcattttcctcttgtcctggcccttcagtctgctccaccaaggggctcttgaaccccttattaaggccccagatgatcccagtcactcctctctagggcagaagactagaggccagggcagcaagggacctgctcatcatattccaacccagccacgactgccatgtaaggttgtgcagggtgtgtactgcacaaggacattgtatgcagggagcactgttcacatcatagataaagctgatttgtatatttattatgacaatttctggcagatgtaggtaaagaggaaaaggatccttttcctaattcacacaaagactccttgtggactggctgtgcccctgatgcagcctgtggcttggagtggccaaataggagggagactgtggtaggggcagggaggcaacactgctgtccacatgacctccatttcccaaagtcctctgctccagcaactgcccttccaggtgggtgtgggacacctgggagaaggtctccaagggagggtgcagccctcttgcccgcacccctccctgcttgcacacttccccatctttgatccttctgagctccacctctggtggctcctcctaggaaaccagctcgtgggctgggaatgggggagagaagggaaaagatccccaagaccccctggggtgggatctgagctcccacctcccttcccacctactgcactttcccccttcccgccttccaaaacctgcttccttcagtttgtaaagtcggtgattatatttttgggggctttccttttattttttaaatgtaaaatttatttatattccgtatttaaagttgtaaaaaaaaataaccacaaaacaaaaccaaatgaatccgccggaggtctgtctgttggcatcgtgcgtgacaattaacctttctgccttggcaggatgtgccgacagcttgcggcgtgttcctctcactctgggagcctcaggcgtgatctcacacactggcgtgcacat

SEQ ID NO: 10484 - protein, 226 aa, Homo sapiens; identical to SEQ ID NO: 1323

SEQ ID NO: 10485 - DNA, 2405 bp, Homo sapiens
gtgtgtgtgtgtgtgcgcatctgagagagagagagagagagactgactgagcaggaatggtgagatgtttatcatgggcctcggggaccccattcccgaggagctttatgagatgctgagtgaccactcgatccgctcctttgatgatctccaacgcctgctgcacggagaccccggagaggaagatggggccgagttggacctgaacatgacccgctcccactctggaggcgagctggagagcttggctcgtggaagaaggagcctgggttccctgaccattgctgagccggccatgatcgccgagtgcaagacgcgcaccgaggtgttcgagatctcccggcgcctcatagaccgcaccaacgccaacttcctggtgtggccgccctgtgtggaggtgcagcgctgctccggctgctgcaacaaccgcaacgtgcagtgccgccccacccaggtgcagctgcgacctgtccaggtgagaaagatcgagattgtgcggaagaagccaatctttaagaaggccacggtgacgctggaagaccacctggcatgcaagtgtgagacagtggcagctgcacggcctgtgacccgaagcccggggggttcccaggagcagcgagccaaaacgccccaaactcgggtgaccattcggacggtgcgagtccgccggccccccaagggcaagcaccggaaattcaagcacacgcatgacaagacggcactgaaggagacccttggagcctaggggcatcggcaggagagtgtgtgggcagggttatttaatatggtatttgctgtattgcccccatggggtccttggagtgataatattgtttccctcgtccgtctgtctcgatgcctgattcggacggccaatggtgcttcccccacccctccacgtgtccgtccacccttccatcagcgggtctcctcccagcggcctccggcgtcttgcccagcagctcaagaagaaaaagaaggactgaactccatcgccatcttcttcccttaactccaagaacttgggataagagtgtgagagagactgatggggtcgctctttgggggaaacgggctccttcccctgcacctggcctgggccacacctgagcgctgtggactgtcctgaggagccctgaggacctctcagcatagcctgcctgatccctgaacccctggccagctctgaggggaggcacctccaggcaggccaggctgcctcggactccatggctaagaccacagacgggcacacagactggagaaaacccctcccacggtgcccaaacaccagtcacctcgtctccctggtgcctctgtgcacagtggcttcttttcgttttcgttttgaagacgtggactcctcttggtgggtgtggccagcacaccaagtggctgggtgccctctcaggtgggttagagatggagtttgctgttgaggtggctgtagatggtgacctgggtatcccctgcctcctgccaccccttcctccccacactccactctgattcacctcttcctctggttcctttcatctctctacctccaccctgcattttcctcttgtcctggcccttcagtctgctccaccaaggggctcttgaaccccttattaaggccccagatgatcccagtcactcctctctagggcagaagactagaggccagggcagcaagggacctgctcatcatattccaacccagccacgactgccatgtaaggttgtgcagggtgtgtactgcacaaggacattgtatgcagggagcactgttcacatcatagataaagctgatttgtatatttattatgacaatttctggcagatgtaggtaaagaggaaaaggatccttttcctaattcacacaaagactccttgtggactggctgtgcccctgatgcagcctgtggcttggagtggccaaataggagggagactgtggtaggggcagggaggcaacactgctgtccacatgacctccatttcccaaagtcctctgctccagcaactgcccttccaggtgggtgtgggacacctgggagaaggtctccaagggagggtgcagccctcttgcccgcacccctccctgcttgcacacttccccatctttgatccttctgagctccacctctggtggctcctcctaggaaaccagctcgtgggctgggaatgggggagagaagggaaaagatccccaagaccccctggggtgggatctgagctcccacctcccttcccacctactgcactttcccccttcccgccttccaaaacctgcttccttcagtttgtaaagtcggtgattatatttttgggggctttccttttattttttaaatgtaaaatttatttatattccgtatttaaagttgtaaaaaaaaataaccacaaaacaaaaccaaatg

SEQ ID NO: 10486 - protein, 226 aa, Homo sapiens; identical to SEQ ID NO: 1323

SEQ ID NO: 10487 - DNA, 3408 bp, Homo sapiens
ggtggcaacttctcctcctgcagccgggagcggcctgcctgcctccctgcgcacccgcagcctcccccgctgcctccctagggctcccctccggccgccagcgcccatttttcattccctagatagagatactttgcgcgcacacacatacatacgcgcgcaaaaaggaaaaaaaaaaaaaaaagcccaccctccagcctcgctgcaaagagaaaaccggagcagccgcagctcgcagctcgcagctcgcagcccgcagcccgcagaggacgcccagagcggcgagcgggcgggcagacggaccgacggactcgcgccgcgtccacctgtcggccgggcccagccgagcgcgcagcgggcacgccgcgcgcgcggagcagccgtgcccgccgcccgggccccgcgccagggcgcacacgctcccgcccccctacccggcccgggcgggagtttgcacctctccctgcccgggtgctcgagctgccgttgcaaagccaactttggaaaaagttttttgggggagacttgggccttgaggtgcccagctccgcgctttccgattttgggggcctttccagaaaatgttgcaaaaaagctaagccggcgggcagaggaaaacgcctgtagccggcgagtgaagacgaaccatcgactgccgtgttccttttcctcttggaggttggagtcccctgggcgcccccacacggctagacgcctcggctggttcgcgacgcagccccccggccgtggatgctcactcgggctcgggatccgcccaggtagcggcctcggacccaggtcctgcgcccaggtcctcccctgccccccagcgacggagccggggccgggggcggcggcgcccgggggccatgcgggtgagccgcggctgcagaggcctgagcgcctgatcgccgcggacccgagccgagcccacccccctccccagccccccaccctggccgcgggggcggcgcgctcgatctacgcgtccggggccccgcggggccgggcccggagtcggcatgaatcgctgctgggcgctcttcctgtctctctgctgctacctgcgtctggtcagcgccgagggggaccccattcccgaggagctttatgagatgctgagtgaccactcgatccgctcctttgatgatctccaacgcctgctgcacggagaccccggagaggaagatggggccgagttggacctgaacatgacccgctcccactctggaggcgagctggagagcttggctcgtggaagaaggagcctgggttccctgaccattgctgagccggccatgatcgccgagtgcaagacgcgcaccgaggtgttcgagatctcccggcgcctcatagaccgcaccaacgccaacttcctggtgtggccgccctgtgtggaggtgcagcgctgctccggctgctgcaacaaccgcaacgtgcagtgccgccccacccaggtgcagctgcgacctgtccaggtgagaaagatcgagattgtgcggaagaagccaatctttaagaaggccacggtgacgctggaagaccacctggcatgcaagtgtgagacagtggcagctgcacggcctgtgacccgaagcccggggggttcccaggagcagcgagccaaaacgccccaaactcgggtgaccattcggacggtgcgagtccgccggccccccaagggcaagcaccggaaattcaagcacacgcatgacaagacggcactgaaggagacccttggagcctaggggcatcggcaggagagtgtgtgggcagggttatttaatatggtatttgctgtattgcccccatggggtccttggagtgataatattgtttccctcgtccgtctgtctcgatgcctgattcggacggccaatggtgcttcccccacccctccacgtgtccgtccacccttccatcagcgggtctcctcccagcggcctccggcgtcttgcccagcagctcaagaagaaaaagaaggactgaactccatcgccatcttcttcccttaactccaagaacttgggataagagtgtgagagagactgatggggtcgctctttgggggaaacgggctccttcccctgcacctggcctgggccacacctgagcgctgtggactgtcctgaggagccctgaggacctctcagcatagcctgcctgatccctgaacccctggccagctctgaggggaggcacctccaggcaggccaggctgcctcggactccatggctaagaccacagacgggcacacagactggagaaaacccctcccacggtgcccaaacaccagtcacctcgtctccctggtgcctctgtgcacagtggcttcttttcgttttcgttttgaagacgtggactcctcttggtgggtgtggccagcacaccaagtggctgggtgccctctcaggtgggttagagatggagtttgctgttgaggtggctgtagatggtgacctgggtatcccctgcctcctgccaccccttcctccccacactccactctgattcacctcttcctctggttcctttcatctctctacctccaccctgcattttcctcttgtcctggcccttcagtctgctccaccaaggggctcttgaaccccttattaaggccccagatgatcccagtcactcctctctagggcagaagactagaggccagggcagcaagggacctgctcatcatattccaacccagccacgactgccatgtaaggttgtgcagggtgtgtactgcacaaggacattgtatgcagggagcactgttcacatcatagataaagctgatttgtatatttattatgacaatttctggcagatgtaggtaaagaggaaaaggatccttttcctaattcacacaaagactccttgtggactggctgtgcccctgatgcagcctgtggcttggagtggccaaataggagggagactgtggtaggggcagggaggcaacactgctgtccacatgacctccatttcccaaagtcctctgctccagcaactgcccttccaggtgggtgtgggacacctgggagaaggtctccaagggagggtgcagccctcttgcccgcacccctccctgcttgcacacttccccatctttgatccttctgagctccacctctggtggctcctcctaggaaaccagctcgtgggctgggaatgggggagagaagggaaaagatccccaagaccccctggggtgggatctgagctcccacctcccttcccacctactgcactttcccccttcccgccttccaaaacctgcttccttcagtttgtaaagtcggtgattatatttttgggggctttccttttattttttaaatgtaaaatttatttatattccgtatttaaagttgtaaaaaaaaataaccacaaaacaaaaccaaatg

SEQ ID NO: 10488 - protein, 241 aa, Homo sapiens; identical to SEQ ID NO: 1321

SEQ ID NO: 10489 - DNA, 1968 bp, Homo sapiens
ggcaacttctcctcctgcagccgggagcggcctgcctgcctccctgcgcacccgcagcctcccccgctgcctccctagggctcccctccggccgccagcgcccatttttcattccctagatagagatactttgcgcgcacacacatacatacgcgcgcaaaaaggaaaaaaaaaaaaaaaagcccaccctccagcctcgctgcaaagagaaaaccggagcagccgcagctcgcagctcgcagctcgcagcccgcagcccgcagaggacgcccagagcggcgagcgggcgggcagacggaccgacggactcgcgccgcgtccacctgtcggccgggcccagccgagcgcgcagcgggcacgccgcgcgcgcggagcagccgtgcccgccgcccgggccccgcgccagggcgcacacgctcccgcccccctacccggcccgggcgggagtttgcacctctccctgcccgggtgctcgagctgccgttgcaaagccaactttggaaaaagttttttgggggagacttgggccttgaggtgcccagctccgcgctttccgattttgggggcctttccagaaaatgttgcaaaaaagctaagccggcgggcagaggaaaacgcctgtagccggcgagtgaagacgaaccatcgactgccgtgttccttttcctcttggaggttggagtcccctgggcgcccccacacggctagacgcctcggctggttcgcgacgcagccccccggccgtggatgctcactcgggctcgggatccgcccaggtagcggcctcggacccaggtcctgcgcccaggtcctcccctgccccccagcgacggagccggggccgggggcggcggcgcccgggggccatgcgggtgagccgcggctgcagaggcctgagcgcctgatcgccgcggacccgagccgagcccacccccctccccagccccccaccctggccgcgggggcggcgcgctcgatctacgcgtccggggccccgcggggccgggcccggagtcggcatgaatcgctgctgggcgctcttcctgtctctctgctgctacctgcgtctggtcagcgccgagggggaccccattcccgaggagctttatgagatgctgagtgaccactcgatccgctcctttgatgatctccaacgcctgctgcacggagaccccggagaggaagatggggccgagttggacctgaacatgacccgctcccactctggaggcgagctggagagcttggctcgtggaagaaggagcctgggttccctgaccattgctgagccggccatgatcgccgagtgcaagacgcgcaccgaggtgttcgagatctcccggcgcctcatagaccgcaccaacgccaacttcctggtgtggccgccctgtgtggaggtgcagcgctgctccggctgctgcaacaaccgcaacgtgcagtgccgccccacccaggtgcagctgcgacctgtccaggtgagaaagatcgagattgtgcggaagaagccaatctttaagaaggccacggtgacgctggaagaccacctggcatgcaagtgtgagacagtggcagctgcacggcctgtgacccgaagcccggggggttcccaggagcagcgagccaaaacgccccaaactcgggtgaccattcggacggtgcgagtccgccggccccccaagggcaagcaccggaaattcaagcacacgcatgacaagacggcactgaaggagacccttggagcctaggggcatcggcaggagagtgtgtgggcagggttatttaatatggtatttgctgtattgcccccatggggtccttggagtgataatattgtttccctcgtccgtctgtctcgatgcctgattcggacggccaatggtgcttcccccacccctccacgtgtccgtccacccttccatcagcgggtctcctcccagcggcctccggcgtcttgcccagcagctcaag

SEQ ID NO: 10490 - protein, 241 aa, Homo sapiens; identical to SEQ ID NO: 1321

SEQ ID NO: 10491 - DNA, 1697 bp, Homo sapiens
cgaatcggacagtgtagaaccattctctactgccttccttctgagaacagccttgtggtcagaagtggctgggatagcggagggccaggggacaacttcttaacacgttcctggaccctttgctctttgtagcctactgataactgcaaaggggagcttggaattatgttagtcagtccctgtgaatgggggagcttaaactaatggatgccttaaaaagcacccattcagaattgagttcagggtgacacccccagagcctatccagcttgacaggggagacctgtgggtaatgcacatgaaataatcttatcactccctcagatgacccagccatggttggtaattgctgagtagcaggaaggggtcagtgggaggtgctgggcgctgaggtgaagtaatgtgtatccattccaggggtcaccagtcgttggcacaccaagaagctgccccgcaagacccaccgaggcctgcgcaaggtggcctgtattggggcatggcatcctgctcgtgtagccttctctgtggcacgcgctgggcagaaaggctaccatcaccgcactgagatcaacaagaagatttataagattggccagggctaccttatcaaggacggcaagctgatcaagaacaatgcctccactgactatgacctatctgacaagagcatcaaccctctggtaagtaatgggtgttctgctctgtgaggccatcccaggcctcgtgcttttggggataggctgcttcctaggggctgctagcaggatcgttaactgaagccaacacaacacctagctgtgtcccttgtaagtggcatgttgtcatctgagtccactcgtcggggttggctggtgagaagtggggtctcaggctcagctgttcagtgatgaggcctggaatgtgcgctgggcacagcgcccgagacagactgcggaaccgttccttgttgccttccttctgagaacagccctgtggtcagggagggcctgaacctggaggggtcatctgcacgacaatcccctcctgggcctgtgctgatccgatgctcgttttccagggtggctttgtccactatggtgaagtgaccaatgactttgtcatgctgaaaggctgtgtggtgggaaccaagaagcgggtgctcaccctccgcaaggtgaggcaggtcctgacttgtcatgggggggctcttgtagagggaggatccaaggccacagacgctggtggccctgtggtgggagaggaaaggaaggagagggtgttggcagtcctttcacactggctttgaagtcctgagatgaggaaattcccagtctggccttgctgggctgtttgctgctttgagtgtgtcctcatctgccggatggtgggggaggctgaattgatcgtgtggcttcccagatgcaggggcgctgtgaacagtgctgaggaaagcctggctcctcgtaatcctaaatcccttcccctcttggcccatagtccttgctggtgcagacgaagcggcgggctctggagaagattgaccttaagttcattgacaccacctccaagtttggccatggccgcttccagaccatggaggagaagaaagcattcatgggaccactgaagaaagaccgaattgcaaaggaagaaggagcttaatgccaggaacagattttgcagttggtggggtctcaataaaagttattttccactga

SEQ ID NO: 10492 - protein, 103 aa, Homo sapiens
MRKFPVWPCWAVCCFECVLICRMVGEAELIVWLPRCRGAVNSAEESLAPRNPKSLPLLAHSPCWCRRSGGLWRRLTLSSLTPPPSLAMAASRPWRRRKHSWDH

SEQ ID NO: 10493 - DNA, 1690 bp, Homo sapiens
ggtgaacaagaaggaggtggtggaggctgtgaccattgtagagacaccacccatggtggttgtgggcattgtgggctacgtggaaacccctcgaggcctccggaccttcaagactgtctttgctgagcacatcagtgatgaatgcaagaggcgtttctataagaattggtaagggaggaggccatgcagtccctagcttgggagcttgggagctggagagcagggagcagcgtgtgcatggtttctcagctctgtagcaggcagggagctgctgtcttgggtttagtttgcctctcgaacagaaaaatacctgggatcagacttggccagccatctggtttcagccggaagctaacaccctcattctgagtccaggctagtgggtggtggctgaggacccagttggttgaggagtccaactagaaaccaggagaggtagcagaataattaaacccctataggggtggcaagggcctctggccctgggtggaatgtcccatttccttcatcactgagtgggcttccccagggcagaaaggtttgtcccggagcaagaattttgtttgaatgcgtgtaacttaaattaaccttgtggacctctgctcagctccgctcggctctgcccgatgagctccatccaggctccgcttgctggtggaaaaggctccttagaagccggcaatgagctccatccccacgcggtgccagtgtgccttccgctcacccctcggaggggtgatgaaggcctgcacctggtcccctccccaactctgctctgctcctgaaggcataaatctaagaagaaggcctttaccaagtactgcaagaaatggcaggatgaggatggcaagaagcagctggagaaggacttcagcagcatgaagaagtactgccaagtcatccgtgtcattgcccacacccagatgcgcctgcttcctctgcgccagaagaaggcccacctgatggagatccaggtgaacggaggcactgtggccgagaagctggactgggcccgcgagaggcttgagcagcaggtacctgtgaaccaagtgtttgggcaggatgagatgatcgacgtcatcggggtgaccaagggcaaaggctacaaaggggtcaccagtcgttggcacaccaagaagctgccccgcaagacccaccgaggcctgcgcaaggtggcctgtattggggcatggcatcctgctcgtgtagccttctctgtggcacgcgctgggcagaaaggctaccatcaccgcactgagatcaacaagaagatttataagattggccagggctaccttatcaaggacggcaagctgatcaagaacaatgcctccactgactatgacctatctgacaagagcatcaaccctctgggtggctttgtccactatggtgaagtgaccaatgactttgtcatgctgaaaggctgtgtggtgggaaccaagaagcgggtgctcaccctccgcaagtccttgctggtgcagacgaagcggcgggctctggagaagattgaccttaagttcattgacaccacctccaagtttggccatggccgcttccagaccatggaggagaagaaagcattcatgggaccactgaagaaagaccgaattgcaaaggaagaaggagcttaatgccaggaacagattttgcagttggtggggtctcaataaaagttattttccactga

SEQ ID NO: 10494 - protein, 251 aa, Homo sapiens
MKKYCQVIRVIAHTQMRLLPLRQKKAHLMEIQVNGGTVAEKLDWARERLEQQVPVNQVFGQDEMIDVIGVTKGKGYKGVTSRWHTKKLPRKTHRGLRKVACIGAWHPARVAFSVARAGQKGYHHRTEINKKIYKIGQGYLIKDGKLIKNNASTDYDLSDKSINPLGGFVHYGEVTNDFVMLKGCVVGTKKRVLTLRKSLLVQTKRRALEKIDLKFIDTTSKFGHGRFQTMEEKKAFMGPLKKDRIAKEEGA

SEQ ID NO: 10495 - DNA, 3157 bp, Homo sapiens
aggtgaacaagaaggaggtggtggaggctgtgaccattgtagagacaccacccatggtggttgtgggcattgtgggctacgtggaaacccctcgaggcctccggaccttcaagactgtctttgctgagcacatcagtgatgaatgcaagaggcgtttctataagaattgctccgctcggctctgcccgatgagctccatccaggctccgcttgctggtggaaaaggctccttagaagccggcaatgagctccatccccacgcggtgccagtgtgccttccgctcacccctcggaggggtgatgaaggcctgcacctggtcccctccccaactctgctctgctcctgaaggcataaatctaagaagaaggcctttaccaagtactgcaagaaatggcaggatgaggatggcaagaagcagctggagaaggacttcagcagcatgaagaagtactgccaagtcatccgtgtcattgcccacacccagatgcgcctgcttcctctgcgccagaagaaggcccacctgatggagatccaggtgaacggaggcactgtggccgagaagctggactgggcccgcgagaggcttgagcagcaggtacctgtgaaccaagtgtttgggcaggatgagatgatcgacgtcatcggggtgaccaagggcaaaggctacaaaggtgagctttgcggtggcttgagttgctgtgcaaacctgggggagaagtggtttcaggcccagctgttcgttgatgaggctcagagtgagcgctgggtacagcgcccgaatcggacagtgtagaaccattctctactgccttccttctgagaacagccttgtggtcagaagtggctgggatagcggagggccaggggacaacttcttaacacgttcctggaccctttgctctttgtagcctactgataactgcaaaggggagcttggaattatgttagtcagtccctgtgaatgggggagcttaaactaatggatgccttaaaaagcacccattcagaattgagttcagggtgacacccccagagcctatccagcttgacaggggagacctgtgggtaatgcacatgaaataatcttatcactccctcagatgacccagccatggttggtaattgctgagtagcaggaaggggtcagtgggaggtgctgggcgctgaggtgaagtaatgtgtatccattccaggggtcaccagtcgttggcacaccaagaagctgccccgcaagacccaccgaggcctgcgcaaggtggcctgtattggggcatggcatcctgctcgtgtagccttctctgtggcacgcgctgggcagaaaggctaccatcaccgcactgagatcaacaagaaggtgaggttctgagagtggctccctgggggtgggaagaggcccccgtgatggggagtggggtttctgtgcctgtcagtgctgcttcactgactgtagcttatgcatcacgtggacatcagtggcttgcttctcatggtcagttctggcccatcttgatgatttgtaaggtgccatcctgtagagtggctgtggtggggctgactggtgtggctggggatactagtcttattggtccctgatgccaccaccaggggggtgacaggcctgtgttgtacagcaggatctttagttttagcccagccgccttacagaaaggaacctggagggccagccagctttttgctctgaccttgggatacgctgtgactgggactgaggcctcagctgccttctagcgtgctttgcaggtcagcacactggcatgtctgggttatttgtccctaatgccccagccttacacccttcttgttcattcagatttataagattggccagggctaccttatcaaggacggcaagctgatcaagaacaatgcctccactgactatgacctatctgacaagagcatcaaccctctggtaagtaatgggtgttctgctctgtgaggccatcccaggcctcgtgcttttggggataggctgcttcctaggggctgctagcaggatcgttaactgaagccaacacaacacctagctgtgtcccttgtaagtggcatgttgtcatctgagtccactcgtcggggttggctggtgagaagtggggtctcaggctcagctgttcagtgatgaggcctggaatgtgcgctgggcacagcgcccgagacagactgcggaaccgttccttgttgccttccttctgagaacagccctgtggtcagggagggcctgaacctggaggggtcatctgcacgacaatcccctcctgggcctgtgctgatccgatgctcgttttccagggtggctttgtccactatggtgaagtgaccaatgactttgtcatgctgaaaggctgtgtggtgggaaccaagaagcgggtgctcaccctccgcaaggtgaggcaggtcctgacttgtcatgggggggctcttgtagagggaggatccaaggccacagacgctggtggccctgtggtgggagaggaaaggaaggagagggtgttggcagtcctttcacactggctttgaagtcctgagatgaggaaattcccagtctggccttgctgggctgtttgctgctttgagtgtgtcctcatctgccggatggtgggggaggctgaattgatcgtgtggcttcccagatgcaggggcgctgtgaacagtgctgaggaaagcctggctcctcgtaatcctaaatcccttcccctcttggcccatagtccttgctggtgcagacgaagcggcgggctctggagaagattgaccttaagttcattgacaccacctccaagtttggccatggccgcttccagaccatggaggagaagaaagcattcatggtgagcacctctgcctgcccccctcgctgggtgtggtggcttgggcagccgcctgcctttggctccagccggggtaggggtggtcttgatgccttaggcctctcttgtggctgtggagactggcccagagtcttggtctcctctagagtgggcatctgctgtcacctgtcatcttctacctctgaccactgcctctctccccacagggaccactgaagaaagaccgaattgcaaaggaagaaggagcttaatgccaggaacagattttgcagttggtggggtctcaataaaagttattttccactga

SEQ ID NO: 10496 - protein, 117 aa, Homo sapiens
MKKYCQVIRVIAHTQMRLLPLRQKKAHLMEIQVNGGTVAEKLDWARERLEQQVPVNQVFGQDEMIDVIGVTKGKGYKGELCGGLSCCANLGEKWFQAQLFVDEAQSERWVQRPNRTV

SEQ ID NO: 10497 - DNA, 2158 bp, Homo sapiens
aggtgaacaagaaggaggtggtggaggctgtgaccattgtagagacaccacccatggtggttgtgggcattgtgggctacgtggaaacccctcgaggcctccggaccttcaagactgtctttgctgagcacatcagtgatgaatgcaagaggcgtttctataagaattgctccgctcggctctgcccgatgagctccatccaggctccgcttgctggtggaaaaggctccttagaagccggcaatgagctccatccccacgcggtgccagtgtgccttccgctcacccctcggaggggtgatgaaggcctgcacctggtcccctccccaactctgctctgctcctgaaggcataaatctaagaagaaggcctttaccaagtactgcaagaaatggcaggatgaggatggcaagaagcagctggagaaggacttcagcagcatgaagaagtactgccaagtcatccgtgtcattgcccacacccagatgcgcctgcttcctctgcgccagaagaaggcccacctgatggagatccaggtgaacggaggcactgtggccgagaagctggactgggcccgcgagaggcttgagcagcaggtacctgtgaaccaagtgtttgggcaggatgagatgatcgacgtcatcggggtgaccaagggcaaaggctacaaaggggtcaccagtcgttggcacaccaagaagctgccccgcaagacccaccgaggcctgcgcaaggtggcctgtattggggcatggcatcctgctcgtgtagccttctctgtggcacgcgctgggcagaaaggctaccatcaccgcactgagatcaacaagaagatttataagattggccagggctaccttatcaaggacggcaagctgatcaagaacaatgcctccactgactatgacctatctgacaagagcatcaaccctctggtaagtaatgggtgttctgctctgtgaggccatcccaggcctcgtgcttttggggataggctgcttcctaggggctgctagcaggatcgttaactgaagccaacacaacacctagctgtgtcccttgtaagtggcatgttgtcatctgagtccactcgtcggggttggctggtgagaagtggggtctcaggctcagctgttcagtgatgaggcctggaatgtgcgctgggcacagcgcccgagacagactgcggaaccgttccttgttgccttccttctgagaacagccctgtggtcagggagggcctgaacctggaggggtcatctgcacgacaatcccctcctgggcctgtgctgatccgatgctcgttttccagggtggctttgtccactatggtgaagtgaccaatgactttgtcatgctgaaaggctgtgtggtgggaaccaagaagcgggtgctcaccctccgcaaggtgaggcaggtcctgacttgtcatgggggggctcttgtagagggaggatccaaggccacagacgctggtggccctgtggtgggagaggaaaggaaggagagggtgttggcagtcctttcacactggctttgaagtcctgagatgaggaaattcccagtctggccttgctgggctgtttgctgctttgagtgtgtcctcatctgccggatggtgggggaggctgaattgatcgtgtggcttcccagatgcaggggcgctgtgaacagtgctgaggaaagcctggctcctcgtaatcctaaatcccttcccctcttggcccatagtccttgctggtgcagacgaagcggcgggctctggagaagattgaccttaagttcattgacaccacctccaagtttggccatggccgcttccagaccatggaggagaagaaagcattcatggtgagcacctctgcctgcccccctcgctgggtgtggtggcttgggcagccgcctgcctttggctccagccggggtaggggtggtcttgatgccttaggcctctcttgtggctgtggagactggcccagagtcttggtctcctctagagtgggcatctgctgtcacctgtcatcttctacctctgaccactgcctctctccccacagggaccactgaagaaagaccgaattgcaaaggaagaaggagcttaatgccaggaacagattttgcagttggtggggtctcaataaaagttattttccactga

SEQ ID NO: 10498 - protein, 173 aa, Homo sapiens
MKKYCQVIRVIAHTQMRLLPLRQKKAHLMEIQVNGGTVAEKLDWARERLEQQVPVNQVFGQDEMIDVIGVTKGKGYKGVTSRWHTKKLPRKTHRGLRKVACIGAWHPARVAFSVARAGQKGYHHRTEINKKIYKIGQGYLIKDGKLIKNNASTDYDLSDKSINPLVSNGCSAL

SEQ ID NO: 10499 - DNA, 1537 bp, Homo sapiens
ggtgaacaagaaggaggtggtggaggctgtgaccattgtagagacaccacccatggtggttgtgggcattgtgggctacgtggaaacccctcgaggcctccggaccttcaagactgtctttgctgagcacatcagtgatgaatgcaagaggcgtttctataagaattggtaagggaggaggccatgcagtccctagcttgggagcttgggagctggagagcagggagcagcgtgtgcatggtttctcagctctgtagcaggcagggagctgctgtcttgggtttagtttgcctctcgaacagaaaaatacctgggatcagacttggccagccatctggtttcagccggaagctaacaccctcattctgagtccaggctagtgggtggtggctgaggacccagttggttgaggagtccaactagaaaccaggagaggtagcagaataattaaacccctataggggtggcaagggcctctggccctgggtggaatgtcccatttccttcatcactgagtgggcttccccagggcagaaaggtttgtcccggagcaagaattttgtttgaatgcgtgtaacttaaattaaccttgtggacctctgctcagctccgctcggctctgcccgatgagctccatccaggctccgcttgctggtggaaaaggctccttagaagccggcaatgagctccatccccacgcggtgccagtgtgccttccgctcacccctcggaggggtgatgaaggcctgcacctggtcccctccccaactctgctctgctcctgaaggcataaatctaagaagaaggcctttaccaagtactgcaagaaatggcaggatgaggatggcaagaagcagctggagaaggacttcagcagcatgaagaagtactgccaagtcatccgtgtcattgcccacacccagatgcgcctgcttcctctgcgccagaagaaggcccacctgatggagatccaggtgaacggaggcactgtggccgagaagctggactgggcccgcgagaggcttgagcagcaggtacctgtgaaccaagtgtttgggcaggatgagatgatcgacgtcatcggggtgaccaagggcaaaggctacaaaggggtcaccagtcgttggcacaccaagaagctgccccgcaagacccaccgaggcctgcgcaaggtggcctgtattggggcatggcatcctgctcgtgtagccttctctgtggcacgcgctgggcagaaaggctaccatcaccgcactgagatcaacaagaagatttataagattggccagggctaccttatcaaggacggcaagctgatcaagaacaatgcctccactgactatgacctatctgacaagagcatcaaccctctgggtggctttgtccactatggtgaagtgaccaatgactttgtcatgctgaaaggctgtgtggtgggaaccaagaagcgggtgctcaccctcctcctgagatgagacgaagcggcgggctctggagaagattgaccttaagttcattgacaccacctccaagtttg

SEQ ID NO: 10500 - protein, 198 aa, Homo sapiens
MKKYCQVIRVIAHTQMRLLPLRQKKAHLMEIQVNGGTVAEKLDWARERLEQQVPVNQVFGQDEMIDVIGVTKGKGYKGVTSRWHTKKLPRKTHRGLRKVACIGAWHPARVAFSVARAGQKGYHHRTEINKKIYKIGQGYLIKDGKLIKNNASTDYDLSDKSINPLGGFVHYGEVTNDFVMLKGCVVGTKKRVLTLLLR

SEQ ID NO: 10501 - DNA, 1155 bp, Homo sapiens
ctctaccggcgggatttgatggcgtgatggtatgtgttgtaatggcggccgtttcattgtcaccggcgtcggcacggctgaatccgcgacgcatcgccgccatcccgtcttggccggcgccgggggtttgctttaggggcacgggcgacccagcggggacttcagtctggcctattttctggaaagtcgagaggcttgtgaagagcttccctaaggatgacccgtccaagccggtgaacaagaaggaggtggtggaggctgtgaccattgtagagacaccacccatggtggttgtgggcattgtgggctacgtggaaacccctcgaggcctccggaccttcaagactgtctttgctgagcacatcagtgatgaatgcaagaggcgtttctataagaattggtaagggaggaggccatgcagtccctagcttgggagcttgggagctggagagcagggagcagcgtgtgcatggtttctcagctctgtagcaggcagggagctgctgtcttgggtttagtttgcctctcgaacagaaaaatacctgggatcagacttggccagccatctggtttcagccggaagctaacaccctcattctgagtccaggctagtgggtggtggctgaggacccagttggttgaggagtccaactagaaaccaggagaggtagcagaataattaaacccctataggggtggcaagggcctctggccctgggtggaatgtcccatttccttcatcactgagtgggcttccccagggcagaaaggtttgtcccggagcaagaattttgtttgaatgcgtgtaacttaaattaaccttgtggacctctgctcagctccgctcggctctgcccgatgagctccatccaggctccgcttgctggtggaaaaggctccttagaagccggcaatgagctccatccccacgcggtgccagtgtgccttccgctcacccctcggaggggtgatgaaggcctgcacctggtcccctccccaactctgctctgctcctgaaggcataaatctaagaagaaggcctttaccaagtactgcaagaaatggcaggatgaggatggcaagaagcagctggagaaggacttcagcagcatgaagaagtactgccaagtcatccgtgtcattgcccacacccag

SEQ ID NO: 10502 - protein, 125 aa, Homo sapiens
MVCVVMAAVSLSPASARLNPRRIAAIPSWPAPGVCFRGTGDPAGTSVWPIFWKVERLVKSFPKDDPSKPVNKKEVVEAVTIVETPPMVVVGIVGYVETPRGLRTFKTVFAEHISDECKRRFYKNW

SEQ ID NO: 10503 - DNA, 1708 bp, Homo sapiens
acccagacccagaaggcgccaccatggcggcgcccccgcagcccgtcacccacctcatctttgacatggacggacttcttctggatactgaacggctgtattcagtggtgtttcaagaaatatgtaatcgctatgacaagaaatacagctgggatgtaaagtccctggttatgggtaagaaggcattagaggcggccctggcagctgggatgcaggtggtcatggttcctgacggaaacttgagccgagatctgacaacaaaggccaccctggtgctgaattccctgcaggacttccagcccgagctgtttggtttgccctcctatgagtgagagggagggcctcagtcttccgcccccagcccactctcatggtccacactgctgggggaaagggaaaggaaatcagcaactcttcaatcccaacctgcgctgtgattttagcctcctgagattggagtttccatcccatgttggtttgtcccagtctaacgtgttgataaaatgtgacttgacggttgagacaaaaaatacagtagagacagaaacgaagcccagaacaaagatgaaacttgaattaccatctcagaagtcaagctgatggagtatgtgataaagtgaatgtacatgtatatacacacacacctccatatatacatgtgtgtatcagtttggtaatatgcaggtaggcattacatgcatatgtatgtagacatatgcatgcatgtatatgtaaaatatatacttttccaagacaaaatggaacatcacttctctcttctagtttttctgaacactggctgggaaatgtaaactgtgtatgcatataagtatatgctttatgtatgcatatgtatgtagatatgtttatatctatcgtctgcatcactctcctcagtgttgatgtcaacatgcaatgacaactgataaagcgagatggtagttctgcctggtttgcagtctgagtgggaaagtcctgtttttgatgagcactccttgttagctaacatttaaattctttttgtgacctcagaatgtctctggatctttcctcattgactgactctgtgccacgtcatccatagtttattgttagtatgaacacaactgtaacatttacctggtatctacatccttacctgcattggaaaatgtttgctacctcacaacaaccatttgcctcctttaagaacactgatgggctgcactttttggatagaaatagaatttgatttcagaatgtatgcttggtgagtctcagtgcccaggaacacttttggaataatttatcagacattgaacttctgtgattaatcgcttttatagatttactcagtctttaaaattcgtctctgatttgccagagaaaaacggtggtagccatggaaatcgggagtgaaggagcactgcttcattgtggctcagcccttcctaggggcctctgccctttgatgtccttgagctactcttcagctctggaagttgtggacaaaccgtaggaatgtatgtgtgcgtgtggtggagtgattgtctgtgaatgacaggccctggctattgattgatgttgcatcaatttagcaaattcatttcctcattcttgatggcctgaatatatgtctgcacttttaatgctcctcttaaccagttgtaacatcttaccatttccctaacaaattgaattagtttaataaaatcttttgacacatgtt

SEQ ID NO: 10504 - protein, 102 aa, Homo sapiens
MAAPPQPVTHLIFDMDGLLLDTERLYSVVFQEICNRYDKKYSWDVKSLVMGKKALEAALAAGMQVVMVPDGNLSRDLTTKATLVLNSLQDFQPELFGLPSYE

SEQ ID NO: 10505 - DNA, 2177 bp, Homo sapiens
cgcgcacttcctcctcgcccccacccagacccagaaggcgccaccatggcggcgcccccgcagcccgtcacccacctcatctttgacatggacggacttcttctgggttatacaggaagcatagtggcagctgcttcgggggagtcctcaagaggcttacaatcacggtggacggatactgaacggctgtattcagtggtgtttcaagaaatatgtaatcgctatgacaagaaatacagctgggatgtaaagtccctggttatgggtaagaaggcattagaggcggcacagattataatagacgtcttgcagctcccgatgtccaaagaggagctggtggaagaaagccaaacgaagttaaaggaagtgttccccacggctgcgctcatgccaggggcggagaaactcatcatccacctgcggaaacatggcatcccctttgcactggccaccagctcggggtccgcgtcgttcgatatgaagacaagccgccacaaggagttcttcagcttgttttcccacattgtgctgggagatgaccccgaagtgcagcatggcaagccagacccggacatcttcctagcttgtgccaagaggttctctccccctcctgctatggagaagtgccttgtctttgaagatgctcccaatggggtggaggcggccctggcagctgggatgcaggtggtcatggttcctgacggaaacttgagccgagatctgacaacaaaggccaccctggtgctgaattccctgcaggacttccagcccgagctgtttggtttgccctcctatgagtgagagggagggcctcagtcttccgcccccagcccactctcatggtccacactgctgggggaaagggaaaggaaatcagcaactcttcaatcccaacctgcgctgtgattttagcctcctgagattggagtttccatcccatgttggtttgtcccagtctaacgtgttgataaaatgtgacttgacggttgagacaaaaaatacagtagagacagaaacgaagcccagaacaaagatgaaacttgaattaccatctcagaagtcaagctgatggagtatgtgataaagtgaatgtacatgtatatacacacacacctccatatatacatgtgtgtatcagtttggtaatatgcaggtaggcattacatgcatatgtatgtagacatatgcatgcatgtatatgtaaaatatatacttttccaagacaaaatggaacatcacttctctcttctagtttttctgaacactggctgggaaatgtaaactgtgtatgcatataagtatatgctttatgtatgcatatgtatgtagatatgtttatatctatcgtctgcatcactctcctcagtgttgatgtcaacatgcaatgacaactgataaagcgagatggtagttctgcctggtttgcagtctgagtgggaaagtcctgtttttgatgagcactccttgttagctaacatttaaattctttttgtgacctcagaatgtctctggatctttcctcattgactgactctgtgccacgtcatccatagtttattgttagtatgaacacaactgtaacatttacctggtatctacatccttacctgcattggaaaatgtttgctacctcacaacaaccatttgcctcctttaagaacactgatgggctgcactttttggatagaaatagaatttgatttcagaatgtatgcttggtgagtctcagtgcccaggaacacttttggaataatttatcagacattgaacttctgtgattaatcgcttttatagatttactcagtctttaaaattcgtctctgatttgccagagaaaaacggtggtagccatggaaatcgggagtgaaggagcactgcttcattgtggctcagcccttcctaggggcctctgccctttgatgtccttgagctactcttcagctctggaagttgtggacaaaccgtaggaatgtatgtgtgcgtgtggtggagtgattgtctgtgaatgacaggccctggctattgattgatgttgcatcaatttagcaaattcatttcctcattcttgatggcctgaatatatgtctgcacttttaatgctcctcttaaccagttgtaacatcttaccatttccctaacaaattgaattagtttaataaaatcttttgacacatgtt

SEQ ID NO: 10506 - protein, 251 aa, Homo sapiens
MAAPPQPVTHLIFDMDGLLLGYTGSIVAAASGESSRGLQSRWTDTERLYSVVFQEICNRYDKKYSWDVKSLVMGKKALEAAQIIIDVLQLPMSKEELVEESQTKLKEVFPTAALMPGAEKLIIHLRKHGIPFALATSSGSASFDMKTSRHKEFFSLFSHIVLGDDPEVQHGKPDPDIFLACAKRFSPPPAMEKCLVFEDAPNGVEAALAAGMQVVMVPDGNLSRDLTTKATLVLNSLQDFQPELFGLPSYE

SEQ ID NO: 10507 - DNA, 2132 bp, Homo sapiens
gcgtgcgcggggcgggcgggtgcgcgcgcacttcctcctcgcccccacccagacccagaaggcgccaccatggcggcgcccccgcagcccgtcacccacctcatctttgacatggacggacttcttctggatactgaacggctgtattcagtggtgtttcaagaaatatgtaatcgctatgacaagaaatacagctgggatgtaaagtccctggttatgggtaagaaggcattagaggcggcacagattataatagacgtcttgcagctcccgatgtccaaagaggagctggtggaagaaagccaaacgaagttaaaggaagtgttccccacggctgcgctcatgccaggggcggagaaactcatcatccacctgcggaaacatggcatcccctttgcactggccaccagctcggggtccgcgtcgttcgatatgaagacaagccgccacaaggagttcttcagcttgttttcccacattgtgctgggagatgaccccgaagtgcagcatggcaagccagacccggacatcttcctagcttgtgccaagaggttctctccccctcctgctatggagaagtgccttgtctttgaagatgctcccaatggggtggaggcggccctggcagctgggatgcaggtggtcatggttcctgacggaaacttgagccgagatctgacaacaaaggccaccctggtgctgaattccctgcaggacttccagcccgagctgtttggtttgccctcctatgagtgagagggagggcctcagtcttccgcccccagcccactctcatggtccacactgctgggggaaagggaaaggaaatcagcaactcttcaatcccaacctgcgctgtgattttagcctcctgagattggagtttccatcccatgttggtttgtcccagtctaacgtgttgataaaatgtgacttgacggttgagacaaaaaatacagtagagacagaaacgaagcccagaacaaagatgaaacttgaattaccatctcagaagtcaagctgatggagtatgtgataaagtgaatgtacatgtatatacacacacacctccatatatacatgtgtgtatcagtttggtaatatgcaggtaggcattacatgcatatgtatgtagacatatgcatgcatgtatatgtaaaatatatacttttccaagacaaaatggaacatcacttctctcttctagtttttctgaacactggctgggaaatgtaaactgtgtatgcatataagtatatgctttatgtatgcatatgtatgtagatatgtttatatctatcgtctgcatcactctcctcagtgttgatgtcaacatgcaatgacaactgataaagcgagatggtagttctgcctggtttgcagtctgagtgggaaagtcctgtttttgatgagcactccttgttagctaacatttaaattctttttgtgacctcagaatgtctctggatctttcctcattgactgactctgtgccacgtcatccatagtttattgttagtatgaacacaactgtaacatttacctggtatctacatccttacctgcattggaaaatgtttgctacctcacaacaaccatttgcctcctttaagaacactgatgggctgcactttttggatagaaatagaatttgatttcagaatgtatgcttggtgagtctcagtgcccaggaacacttttggaataatttatcagacattgaacttctgtgattaatcgcttttatagatttactcagtctttaaaattcgtctctgatttgccagagaaaaacggtggtagccatggaaatcgggagtgaaggagcactgcttcattgtggctcagcccttcctaggggcctctgccctttgatgtccttgagctactcttcagctctggaagttgtggacaaaccgtaggaatgtatgtgtgcgtgtggtggagtgattgtctgtgaatgacaggccctggctattgattgatgttgcatcaatttagcaaattcatttcctcattcttgatggcctgaatatatgtctgcacttttaatgctcctcttaaccagttgtaacatcttaccatttccctaacaaattgaattagtttaataaaatcttttgacacatgtt

SEQ ID NO: 10508 - protein, 228 aa, Homo sapiens
MAAPPQPVTHLIFDMDGLLLDTERLYSVVFQEICNRYDKKYSWDVKSLVMGKKALEAAQIIIDVLQLPMSKEELVEESQTKLKEVFPTAALMPGAEKLIIHLRKHGIPFALATSSGSASFDMKTSRHKEFFSLFSHIVLGDDPEVQHGKPDPDIFLACAKRFSPPPAMEKCLVFEDAPNGVEAALAAGMQVVMVPDGNLSRDLTTKATLVLNSLQDFQPELFGLPSYE

SEQ ID NO: 10509 - DNA, 4068 bp, Homo sapiens
agcgggcgcgggcgctggcagagcgcggcgcggggccggcggcgaaggtccggggtggaatcgacgtcgctgcggctgccgacgacccacacccggccggccgcctccgcagacccaccttggccgcgcggcagggggcgcgcagagccccgagggagcgagtccccgcgcgtggcagctcggcggcttctcccttcgggaggtccggctcccggctctccggacccgcctggcgtcctcgcctgcggcggggcggacgacagcggcgcccaggaatggcttcggcgggcagcggcatggaggaggtgcgcgtgtcggtgctgacccccttgaagctggtcgggctggtgtgcatcttcctggcgctgtgtctggacctgggggcggtgctgagcccggcctgggtcacagctgaccaccagtactacctgtcgttgtgggagtcctgccggaaacccgccagcttggacatctggcactgcgagtccacgctcagcagcgattggcagattgctactctggctttactcctgggcggcgctgccatcattctcattgcattcctggtgggtttgatttctatctgcgtgggatctcgaaggcgtttctatagacctgttgcggtcatgctttttgcagcagttgttttacaggtttgcagcctggtcctttacccaatcaagttcattgaaactgtgagcttgaaaatttaccatgagttcaactggggttatggcctggcctggggtgcaactatattttcgtttgggggtgccatcctttattgcctgaaccctaagaactatgaagactactactagaaccaatagtctcaaagtaaaaacaaccaccaccatccaacaaaaggattacgtctgcatcttttctaacttactattttctaaaacacttgtggagcatcaagcagtttgctcagttgatttaatcttttttgccttttggctgtcaacatcataaccagcttttacatccattttagaaatctgcacaaattaagagagctgattagacataggcaaatgctgcaaacttccaatatgttcatatcgtttttcttgacaaatgaagggtctatatgacagcaaccattgtgagaaactagttggaatgagatttgcctcaatctcctattgcctgcaggggagcagttggcataagcaacatttagaagttcctttgcgctgacaaggattccactgttagagcccttaccgcctgcttatcctacccaatgactacattggctgttggttatttgcttgagtgagcccttgaaaaatgaactgcccttcagcatctaatgggagttgtgaatgtaactggttaatgatacacattccaccttcaggaacactctttttaatgggaggttatgctttggcaatcagcgtctccctgggaagagagtcaagacttggagacatgtgcttctcattatgtggttagaaattggtgcctcagccctatctagactggggaaaaattgaggatctctgtttttcctggggcaaacagaaagaaatctgcatgagttgcttttgtaccctttaaatcatttgccaaacattgcagcaaacaagtgtgcgtatgtaacaagcttcactgtttttatagaaggtgaaccattagtataaatggtaataagttgttccctaaccctccacatacatttgcctatcacacgtaaaattaatatttactctagtgaagtggtttgagcactaaccttgtacacattgttaagaggcttagattggtattcatacttatttaccatacaaaagtatggtaccttaaagcttttgctctatgttctttactgtttcactggaaagtgtcaatagagttgcctaagaataaaaattgaaatggtgttaatctgaaaattaatgattctctgtaagcactgtagttgaaaagagagtagcaattaggatgatcattttgtgtaaaattcattaaaatagaaggctgctattttttgcaagtattttaaatgtcttcatttttttaagaaaggaatagcgatagatttatataaatatctaaatgtctcagtagaggagtagaattcatctggttatcacctggtcctctgaagttaactgatgggctaaccgatttgtgcacacacttaggatggatttatgttaagggaattacttactgactgttcaatggaaggaagtattaataatagggaataagtttgcaactaatctcatgctgcaaacttgtgttaattctgtttaatatacaaatttggatagcttaattataaacatatttttatatcaaatatacagttctaatataaaagttataaataattatttttgttaacaaagacactaaaacagtatgttctggttttggccctcttgcagaaagaagcattagaaaaattactttaaaagtagctatatgttactgtattgcaaaatctgttaagagcaggaccacatcgatagtatttaataatttgttttacctcccaaaacacagttcttctttcagcttgtcttaagaatggttgccaaaaacaacagccaaaaaaaaaaaacctattttattatccaaatgctagaaaacacacatgaattttctataaaatcacgaatatgaagtaccaggtttagtcttactttagcaatgatagacaaaagcgaataaatacatcacagacagaaacctttataaaaatatatgattctataaagaatcattagaaattatgagtggaaattctccagaaagatagtattatagagtcttttgaagcaattttttgagaaatagtaaaatctggggcagagtgtcttgcagttaattgcatattgtcagagcagcatgagaaatatgatatttggatagggatttcagcaactaaacattctctgttctgagatctctttattcctgaataatgaaagaatagtactttggtgctgacaccaatgaggcacttctcttggtcctagtagaggatgcagtgtactgttaaaccaatatcatcacatctcgagtcttatcaagttttcattctctgtcaatatgacaagctcaaagtgacagaatatgttataggttgaagcacacatatttgcagtttactgaaaagtagatttcttatgtgacttttttcccttctcagcaaagagccctacactagatttctaccatcactaatatttggaagtatttcattactaacaatctcagtacaacatgaaaattgttgcttctcatctaaaatacaattttgtctatcagaataaacacaagtgaaattttcacctacattaacattatgtctttgcagctttaggtttgttagatgtgttcttaagcataatttttagccacaaacccattgttagatagatatctatggatatagatctacatctatagatatagatatacacacatatatatactcacacacatatagcataaaatactcagcagggctagttattccgatttcttgcacaattatttagctttttgtaagttcaacatgtaaattttaaagacataaatatagagagacttatgtgtttgaatataaatgatatatatggattagcatgtacctgtatattattaaacatgcaatgaactgactggtaagtgacgtctaattgtatggctagcaatgtaatttattcagactgtatttttgtacagagcagtgcactctaacctatgcctctgtgtcctctttaatgcctaaagctgtgcctagaaatttcatctgtcttaaaagtaaaatatacttcatgctgtttatgctattagtttctgtactgctattctatatttattatttttaaatatatgacatgtttactacttaaacatgaattcatggtatcctggttattttttttaagtcatctgggggaaaacctgtttatcactccagtgattttgagtttgcagtttcacaatcagttcttcatttcatgatttttgtagttgacatgaagtcatctatgtggaaaaaaataaaaataaaagtgatttcacggatgtggtttg

SEQ ID NO: 10510 - protein, 181 aa, Homo sapiens; identical to SEQ ID NO: 1333

SEQ ID NO: 10511 - DNA, 3795 bp, Homo sapiens
gagatgctgcgggggttcgctgttcggtcttccccactctttttccttcctctctcgaggacgaatttgcctagtgttcacatttctgccggttccactccaccttatctgcgttttcaccaatgtatttcggtttggattttatttccttacgtttttgatggatatgaagagttgagagagggacaggcttgttttcctttccttttttggtgacgccgccgttgattattggcagattgctactctggctttactcctgggcggcgctgccatcattctcattgcattcctggtgggtttgatttctatctgcgtgggatctcgaaggcgtttctatagacctgttgcggtcatgctttttgcagcagttgttttacaggtttgcagcctggtcctttacccaatcaagttcattgaaactgtgagcttgaaaatttaccatgagttcaactggggttatggcctggcctggggtgcaactatattttcgtttgggggtgccatcctttattgcctgaaccctaagaactatgaagactactactagaaccaatagtctcaaagtaaaaacaaccaccaccatccaacaaaaggattacgtctgcatcttttctaacttactattttctaaaacacttgtggagcatcaagcagtttgctcagttgatttaatcttttttgccttttggctgtcaacatcataaccagcttttacatccattttagaaatctgcacaaattaagagagctgattagacataggcaaatgctgcaaacttccaatatgttcatatcgtttttcttgacaaatgaagggtctatatgacagcaaccattgtgagaaactagttggaatgagatttgcctcaatctcctattgcctgcaggggagcagttggcataagcaacatttagaagttcctttgcgctgacaaggattccactgttagagcccttaccgcctgcttatcctacccaatgactacattggctgttggttatttgcttgagtgagcccttgaaaaatgaactgcccttcagcatctaatgggagttgtgaatgtaactggttaatgatacacattccaccttcaggaacactctttttaatgggaggttatgctttggcaatcagcgtctccctgggaagagagtcaagacttggagacatgtgcttctcattatgtggttagaaattggtgcctcagccctatctagactggggaaaaattgaggatctctgtttttcctggggcaaacagaaagaaatctgcatgagttgcttttgtaccctttaaatcatttgccaaacattgcagcaaacaagtgtgcgtatgtaacaagcttcactgtttttatagaaggtgaaccattagtataaatggtaataagttgttccctaaccctccacatacatttgcctatcacacgtaaaattaatatttactctagtgaagtggtttgagcactaaccttgtacacattgttaagaggcttagattggtattcatacttatttaccatacaaaagtatggtaccttaaagcttttgctctatgttctttactgtttcactggaaagtgtcaatagagttgcctaagaataaaaattgaaatggtgttaatctgaaaattaatgattctctgtaagcactgtagttgaaaagagagtagcaattaggatgatcattttgtgtaaaattcattaaaatagaaggctgctattttttgcaagtattttaaatgtcttcatttttttaagaaaggaatagcgatagatttatataaatatctaaatgtctcagtagaggagtagaattcatctggttatcacctggtcctctgaagttaactgatgggctaaccgatttgtgcacacacttaggatggatttatgttaagggaattacttactgactgttcaatggaaggaagtattaataatagggaataagtttgcaactaatctcatgctgcaaacttgtgttaattctgtttaatatacaaatttggatagcttaattataaacatatttttatatcaaatatacagttctaatataaaagttataaataattatttttgttaacaaagacactaaaacagtatgttctggttttggccctcttgcagaaagaagcattagaaaaattactttaaaagtagctatatgttactgtattgcaaaatctgttaagagcaggaccacatcgatagtatttaataatttgttttacctcccaaaacacagttcttctttcagcttgtcttaagaatggttgccaaaaacaacagccaaaaaaaaaaaacctattttattatccaaatgctagaaaacacacatgaattttctataaaatcacgaatatgaagtaccaggtttagtcttactttagcaatgatagacaaaagcgaataaatacatcacagacagaaacctttataaaaatatatgattctataaagaatcattagaaattatgagtggaaattctccagaaagatagtattatagagtcttttgaagcaattttttgagaaatagtaaaatctggggcagagtgtcttgcagttaattgcatattgtcagagcagcatgagaaatatgatatttggatagggatttcagcaactaaacattctctgttctgagatctctttattcctgaataatgaaagaatagtactttggtgctgacaccaatgaggcacttctcttggtcctagtagaggatgcagtgtactgttaaaccaatatcatcacatctcgagtcttatcaagttttcattctctgtcaatatgacaagctcaaagtgacagaatatgttataggttgaagcacacatatttgcagtttactgaaaagtagatttcttatgtgacttttttcccttctcagcaaagagccctacactagatttctaccatcactaatatttggaagtatttcattactaacaatctcagtacaacatgaaaattgttgcttctcatctaaaatacaattttgtctatcagaataaacacaagtgaaattttcacctacattaacattatgtctttgcagctttaggtttgttagatgtgttcttaagcataatttttagccacaaacccattgttagatagatatctatggatatagatctacatctatagatatagatatacacacatatatatactcacacacatatagcataaaatactcagcagggctagttattccgatttcttgcacaattatttagctttttgtaagttcaacatgtaaattttaaagacataaatatagagagacttatgtgtttgaatataaatgatatatatggattagcatgtacctgtatattattaaacatgcaatgaactgactggtaagtgacgtctaattgtatggctagcaatgtaatttattcagactgtatttttgtacagagcagtgcactctaacctatgcctctgtgtcctctttaatgcctaaagctgtgcctagaaatttcatctgtcttaaaagtaaaatatacttcatgctgtttatgctattagtttctgtactgctattctatatttattatttttaaatatatgacatgtttactacttaaacatgaattcatggtatcctggttattttttttaagtcatctgggggaaaacctgtttatcactccagtgattttgagtttgcagtttcacaatcagttcttcatttcatgatttttgtagttgacatgaagtcatctatgtggaaaaaaataaaaataaaagtgatttcacggatgtggtt

SEQ ID NO: 10512 - protein, 64 aa, Homo sapiens
MLFAAVVLQVCSLVLYPIKFIETVSLKIYHEFNWGYGLAWGATIFSFGGAILYCLNPKNYEDYY

SEQ ID NO: 10513 - DNA, 1928 bp, Homo sapiens
gcccggctttttcagtaggagccccgcgcggtgcgcgctcacgcacgcgcacggcctcgcctgcgcgctcacgaggcctctcgcggcacgcgcccccgccccgcgccgccccgccccgccccgcctcttccccctcccgcgcgcccgcccgccgcctgccgccgccgccgccgccgccggagctctgtagtatggcatcgaggagaatggagaccaaacctgtgataacctgtctcaaaaccctcctcatcatctactccttcgtcttctggatcactggggtgatcctgctggctgttggagtctggggcaaacttactctgggcacctatatctcccttattgccgagaactccacaaatgctccctatgtgctcatcggaactggcaccactattgttgtctttggcctgtttggatgctttgctacatgtcgtggtagcccatggatgctgaaactgtatgccatgtttctgtccctggtgttcctggctgagctcgtagctggcatttcagggtttgtgtttcgtcatgagatcaaggacaccttcctgaggacttacacggacgctatgcagacttacaatggcaatgatgagaggagccgggcagtggaccatgtgcagcgcagcctgagctgctgtggtgtgcagaactacaccaactggagcaccagcccctacttcctggagcatggcatcccccccagctgctgcatgaacgaaactgattgtaatccccaggatctacacaatctgactgtggccgccaccaaagttaaccagaagggttgttatgatctggtaactagtttcatggagactaacatgggaatcatcgctggagtggcgtttggaatcgcattctcccagttaattggcatgctgctggcctgctgtctgtcccggttcatcacggccaatcagtatgagatggtgtaaggagaagtctttcaagaatgacggaataagagacctgttttaaaaaggaactgcagcaatctttgaaagacttccaaagaatgttagagcacagtacataatacacttgccctgctccctctcccccttaccccacaacgtgcaactgacactcccacccagtctctgctccacctttcagcccacgtcacgtgtagtgtccattttgtgaagccctgttgtgccacagagtgtagccaggtccccctgcagctagtcctagtgaacctcaccccgaggccctgcatgggccagcccctccatctgtacttggtccaactgcaactcatcatcggtgactggttatcacaccatcgctggcccctttgggccctgcatgtagtgtgggaggctcctgttagctcctcactgtggtaaatgccacacacctttaagtagataagcagacgatagttatctgttcttttgacttaatctcatttggtttgattttccctctactaaggctttcctaccttcttcaggctgcctaagacatgtaacgaaacacttcaataattgtccatgaggagaaaaaaagcatgtgtcatgcatgaaggaaactgaacttgaggtggcctccttgcttgttacatacctgggtatgtgtaggcagtttagtgcatctttgcctctcggttgaaacctgtataaccctgttacaaagctgtgttgttgcttcttgtgaaggccatgatattttgtttttccccaattaattgctattgtgttattttactacttctctctgtattttttcttgcattgacattatagacattgaggacctcatccaaacaatttaaaaatgagtgtgaagggggaacaagtcaaaatatttttaaaagatcttcaaaagtaatgcctctgtctagcatgccaacaagaatgcattgatattgtgaacatttgtgatatatgtattaataaatagagcaattacaagca

SEQ ID NO: 10514 - protein, 249 aa, Homo sapiens; identical to SEQ ID NO: 1335

SEQ ID NO: 10515 - DNA, 1168 bp, Homo sapiens
ggcatcgaggagaatggagaccaaacctgtgataacctgtctcaaaaccctcctcatcatctactccttcgtcttctggatcactggggtgatcctgctggctgttggagtctggggcaaacttactctgggcacctatatctcccggttcatcacggccaatcagtatgagatggtgtaaggagaagtctttcaagaatgacggaataagagacctgttttaaaaaggaactgcagcaatctttgaaagacttccaaagaatgttagagcacagtacataatacacttgccctgctccctctcccccttaccccacaacgtgcaactgacactcccacccagtctctgctccacctttcagcccacgtcacgtgtagtgtccattttgtgaagccctgttgtgccacagagtgtagccaggtccccctgcagctagtcctagtgaacctcaccccgaggccctgcatgggccagcccctccatctgtacttggtccaactgcaactcatcatcggtgactggttatcacaccatcgctggcccctttgggccctgcatgtagtgtgggaggctcctgttagctcctcactgtggtaaatgccacacacctttaagtagataagcagacgatagttatctgttcttttgacttaatctcatttggtttgattttccctctactaaggctttcctaccttcttcaggctgcctaagacatgtaacgaaacacttcaataattgtccatgaggagaaaaaaagcatgtgtcatgcatgaaggaaactgaacttgaggtggcctccttgcttgttacatacctgggtatgtgtaggcagtttagtgcatctttgcctctcggttgaaacctgtataaccctgttacaaagctgtgttgttgcttcttgtgaaggccatgatattttgtttttccccaattaattgctattgtgttattttactacttctctctgtattttttcttgcattgacattatagacattgaggacctcatccaaacaatttaaaaatgagtgtgaagggggaacaagtcaaaatatttttaaaagatcttcaaaagtaatgcctctgtctagcatgccaacaagaatgcattgatattgtgaacatttgtgatatatgtattaataaatagagcaattacaagca

SEQ ID NO: 10516 - protein, 55 aa, Homo sapiens
METKPVITCLKTLLIIYSFVFWITGVILLAVGVWGKLTLGTYISRFITANQYEMV

SEQ ID NO: 10517 - DNA, 3972 bp, Homo sapiens
aagggcccagagctctggccggcggaccttttccttctggagtttccccggcgggtattagtccttgtggcaccaagtcagaatttcattcaaaagacaattaggaagatggttttctatggaaaatatttaagtgtaggtcttaatgtgaaagaaagagggagagaaagaaacccctttattatgttctcccttccttaggcattttttgtcccgtgggaaaaaactgtactagggacagagacctctgttaagttttagagaaaagggatcttttttttttttatttgagacagagtcttgctctgtcgcccaggctggagtgcagtggcacgatctcggctcactgcaactccgcctcctgggttcaagcaattctcctgcttcatcctcccgagtagctgggattacaggcgctggccaccacgcccggctaatttttgtatttttagtagagaccgggtttcaccatgttggccaggctagtctggaacccctgactttgtgatccgcccgcctcggcctcccaaagtgctgggattacaggcgtgagccaccgtttcaggccgagaaaagggatttaaaatgagaagcttgaatcttattgaacataattgtaggactgccagagaggactggtggatgaggaatatggcaagggacatgagatgggaaaaattaaataggctgtggtttggaagtctcaaagtgaaattcaaggtgcaaggctcttaaaagttaaatccagcgattcggtacatagcttaggccctattaaatgacccagtgctttaagaactatcttttgaaaggaacacttcacacaagcaccctcaaaaataattagacacctccccatttctctgttaaatggtgaaagacacccaagactagacctaactactgtcaccctctcctggcctcttggcagccaaaaggccacatggcccaggctctccagcatcactgtgtagccgacttggacaaaaatggacttctccccattgccacttgcagatctcttcaaagaatcagcagatctgatagtgtgcccctcttcatccccggcaaccactgttaaaggaaagattgggaaagatcccaccccgccaggagggaggcaaaagcctctgacgctcccctccccccatagctgaccaaggccagggccactgcgggagcaccgcgcgtccacgtgcacccagcatgcccggtcaccctttattacgtaagagtcccaggatggagttgtacctgctgccggcccctcttccccgacggctaataataaacccgggttcctgtttcccggccgcggccactccagattcggggctgaggggctcactctgcaaccaaggcacgtgcattctggtcatcccacgcggggagcgcgcgcaaggcccgcccagcccccacatgccagccccaccctccagtcggtccggacgccgacgcctttttgaccctcgctgtgcccggccctcctcatctggcctgcccagggcttggtgctggcggggtccagctgctccaatccctcctcctctgctctgccctgccctgccctggcctgccccggcgccctccctcagcccgggtatcaggcgagaggcggagctggcccggcgcgccccgcccccgctgtagaaagggccgggcgagtgttactcgcggtcatcccggcctgggccttttatctcggtgctgccgggggaggcgggaggaggagacaccaggggtggccctgagcgccggcgacacctttcctggactataaattgagcacctgggatgggtagggggccaacgcagtcaccgccgtccgcagtcacagtccagccactgaccgcagcagcgcccttgcgtagcagccgcttgcagcgagaacactgaattgccaacgagcaggagagtctcaaggcgcaagaggaggtgggtgcccacgccccatcgctgccccggccagcttggttgcttgagctcaggcttttcggagggagaagttgtggtggtggggggacacccttctccccgcggccgtaggtgggcgaggaggtgggactgcccagccgcggggagccacccaggcgccgtcccggacgagctgtagccagagaagggggtgcgcgcgggcaagggcgccaggccccctagcagggtgaataatctaatctgttctttcgtctccgtgtatcaaacaggccagggctcgacccacagagcaccctcagccatcgcgagtttccgggcgccaaagccaggagaagccgcccatcccgcagggccggtctgccagcgagacgagagttggcgagggcggaggagtgccgggaatcccgccacaccggctatagccaggcccccagcgcgggccttggagagcgcgtgaaggcgggcatccccttgacccggccgaccatccccgtgcccctgcgtccctgcgctccaacgtccgcgcggccaccatgatgcaaatctgcgacacctacaaccagaagcactcgctctttaacgccatgaatcgcttcattggcgccgtgaacaacatggaccagacggtgatggtgcccagcttgctgcgcgacgtgcccctggctgaccccgggttagacaacgatgttggcgtggaggtaggcggcagtggcggctgcctggaggagcgcacgcccccagtccccgactcgggaagcgccaatggcagctttttcgcgccctctcgggacatgtacagccactacgtgcttctcaagtccatccgcaacgacatcgagtggggggtcctgcaccagccgcctccaccggctgggagcgaggagggcagtgcctggaagtccaaggacatcctggtggacctgggccacttggagggtgcggacgccggcgaagaagacctggaacagcagttccactaccacctgcgcgggctgcacactgtgctctcgaaactcacgcgcaaagccaacatcctcactaacagatacaagcaggagatcggcttcggcaattggggccactgaggcgtggcgcccgtggctgcccagcaccttcttcgacccatctcaccctctctcattcctcaaagctttttttttttttcctggctggggggcgggaagggcagactgcaaactggggggctgcgtacgtgcaggaggcgcggtggggctgcgtggaggagggggccacgtgtgagagagaagaaaatggtggccggagatgggagggcccaaggaacctcctgggagggggcctgcattctatgttggtgggaatgggactgggctgacgccctgcattcagcctgtgcctttcctggggtttcttttctgttcttttcggaggagagggcccgagaaggggccataccagggcgcggcgctgggttgccacacttgggaaagcagcccggagctgggtgctggggaaggcggggcgcgtagcctcccgccgccctgcggttgggccggtggaggcccaggcgttgctaggattgcatcagttttcctgtttgcactatttctttttgtaacattggccctgtgtgaagtatttcgaatctcctccttgctctgaaacttcagcgattccattgtgataagcgcacaaacagcactgtctgtcggtaatcggtactactttattaatgattttctgttacactgtatagtagtcctatggcacccccaccccatccctttcgtgccactcccgtccccacccccaccccagtgtgtataagctggcatttcgccagcttgtacgtagcttgccactcagtgaaaataataacattattatgagaaagtggacttaaccgaaatggaaccaactgacattctatcgtgttgtacatagaatgatgaagggttccactgttgttgtatgtcttaaatttatttaaaactttttttaatccagatgtagactatattctaaaaaataaaaaagcaaatgtgtcaactaaattgg

SEQ ID NO: 10518 - protein, 183 aa, Homo sapiens; identical to SEQ ID NO: 1337

SEQ ID NO: 10519 - DNA, 1824 bp, Homo sapiens
aagggcccagagctctggccggcggaccttttccttctggagtttccccggcgggtgccagggctcgacccacagagcaccctcagccatcgcgagtttccgggcgccaaagccaggagaagccgcccatcccgcagggccggtctgccagcgagacgagagttggcgagggcggaggagtgccgggaatcccgccacaccggctatagccaggcccccagcgcgggccttggagagcgcgtgaaggcgggcatccccttgacccggccgaccatccccgtgcccctgcgtccctgcgctccaacgtccgcgcggccaccatgatgcaaatctgcgacacctacaaccagaagcactcgctctttaacgccatgaatcgcttcattggcgccgtgaacaacatggaccagacggtgatggtgcccagcttgctgcgcgacgtgcccctggctgaccccgggttagacaacgatgttggcgtggaggtaggcggcagtggcggctgcctggaggagcgcacgcccccagtccccgactcgggaagcgccaatggcagctttttcgcgccctctcgggacatgtacagccactacgtgcttctcaagtccatccgcaacgacatcgagtggggggtcctgcaccagccgcctccaccggctgggagcgaggagggcagtgcctggaagtccaaggacatcctggtggacctgggccacttggagggtgcggacgccggcgaagaagacctggaacagcagttccactaccacctgcgcgggctgcacactgtgctctcgaaactcacgcgcaaagccaacatcctcactaacagatacaagcaggagatcggcttcggcaattggggccactgaggcgtggcgcccgtggctgcccagcaccttcttcgacccatctcaccctctctcattcctcaaagctttttttttttttcctggctggggggcgggaagggcagactgcaaactggggggctgcgtacgtgcaggaggcgcggtggggctgcgtggaggagggggccacgtgtgagagagaagaaaatggtggccggagatgggagggcccaaggaacctcctgggagggggcctgcattctatgttggtgggaatgggactgggctgacgccctgcattcagcctgtgcctttcctggggtttcttttctgttcttttcggaggagagggcccgagaaggggccataccagggcgcggcgctgggttgccacacttgggaaagcagcccggagctgggtgctggggaaggcggggcgcgtagcctcccgccgccctgcggttgggccggtggaggcccaggcgttgctaggattgcatcagttttcctgtttgcactatttctttttgtaacattggccctgtgtgaagtatttcgaatctcctccttgctctgaaacttcagcgattccattgtgataagcgcacaaacagcactgtctgtcggtaatcggtactactttattaatgattttctgttacactgtatagtagtcctatggcacccccaccccatccctttcgtgccactcccgtccccacccccaccccagtgtgtataagctggcatttcgccagcttgtacgtagcttgccactcagtgaaaataataacattattatgagaaagtggacttaaccgaaatggaaccaactgacattctatcgtgttgtacatagaatgatgaagggttccactgttgttgtatgtcttaaatttatttaaaactttttttaatccagatgtagactatattctaaaaaataaaaaagcaaatgtgtcaactaaattgg

SEQ ID NO: 10520 - protein, 183 aa, Homo sapiens; identical to SEQ ID NO: 1337

SEQ ID NO: 10521 - DNA, 1902 bp, Homo sapiens
aagggcccagagctctggccggcggaccttttccttctggagtttccccggcgggtgccagggctcgacccacagagcaccctcagccatcgcgagtttccgggcgccaaagccaggagaagccgcccatcccgcagggccggtctgccagcgagacgagagttggcgagggcggaggagtgccgggaatcccgccacaccggctatagccaggcccccagcgcgggccttggagagcgcgtgaaggcgggcatccccttgacccggccgaccatccccgtgcccctgcgtccctgcgctccaacgtccgcgcggccaccatgatgcaaatctgcgacacctacaaccagaagcactcgctctttaacgccatgaatcgcttcattggcgccgtgaacaacatggaccagacggtgatggtgcccagcttgctgcgcgacgtgcccctggctgaccccgggttagacaacgatgttggcgtggaggtaggcggcagtggcggctgcctggaggagcgcacgcccccagtccccgactcgggaagcgccaatggcagctttttcgcgccctctcgggacatgtacagccactacgtgcttctcaagtccatccgcaacgacatcgagtggggggtcctgcaccagccgcctccaccggctgggagcgaggagggcagtgcctggaagtccaaggacatcctggtggacctgggccacttggagggtgcggacgccggcgaagaagacctggaacagcagttccactaccacctgcgcgggctgcacactgtgctctcgaaactcacgcgcaaagccaacatcctcactaacagatacaagcaggagatcggcttcggcaattggggccactgaggcgtggcgcccgtggctgcccagcaccttcttcgacccatctcaccctctctcattcctcaaagctttttttttttttcctggctggggggcgggaagggcagactgcaaactggggggctgcgtacgtgcaggaggcgcggtggggctgcgtggaggagggggccacgtgtgagagagaagaaaatggtggccggagatgggagggcccaaggaacctcctgggagggggcctgcattctatgttggtgggaatgggactgggctgacgccctgcattcagcctgtgcctttcctggggtttcttttctgttcttttcggaggagagggcccgagaaggggccataccagggcgcggcgctgggttgccacacttgggaaagcagcccggagctgggtgctggggaaggcggggcgcgtagcctcccgccgccctgcggttgggccggtggaggcccaggcgttgctaggattgcatcagttttcctgtttgcactatttctttttgtaacattggccctgtgtgaagtatttcgaatctcctccttgctctgaaacttcagcgattccattgtgataagcgcacaaacagcactgtctgtcggtaatcggtactactttattaatgattttctgttacactgtatagtagtcctatggcacccccaccccatccctttcgtgccactcccgtccccacccccaccccagtgtgtataagctggcatttcgccagcttgtacgtagcttgccactcagtgaaaataataacattattatgagaaagtggacttaaccgaaatggaaccaactgacattctatcgtgttgtacatagaatgatgaagggttccactgttgttgtatgtcttaaatttatttaaaactttttttaatccagatgtagactatattctaaaaaataaaaaagcaaatgtgtcaactaaattggacaagcgtctggtcctcattaatctgccaatgaatggtttcgtcattaaataaaaatcaatttaattgatttactagc

SEQ ID NO: 10522 - protein, 183 aa, Homo sapiens; identical to SEQ ID NO: 1337

SEQ ID NO: 10523 - DNA, 4050 bp, Homo sapiens
aagggcccagagctctggccggcggaccttttccttctggagtttccccggcgggtattagtccttgtggcaccaagtcagaatttcattcaaaagacaattaggaagatggttttctatggaaaatatttaagtgtaggtcttaatgtgaaagaaagagggagagaaagaaacccctttattatgttctcccttccttaggcattttttgtcccgtgggaaaaaactgtactagggacagagacctctgttaagttttagagaaaagggatcttttttttttttatttgagacagagtcttgctctgtcgcccaggctggagtgcagtggcacgatctcggctcactgcaactccgcctcctgggttcaagcaattctcctgcttcatcctcccgagtagctgggattacaggcgctggccaccacgcccggctaatttttgtatttttagtagagaccgggtttcaccatgttggccaggctagtctggaacccctgactttgtgatccgcccgcctcggcctcccaaagtgctgggattacaggcgtgagccaccgtttcaggccgagaaaagggatttaaaatgagaagcttgaatcttattgaacataattgtaggactgccagagaggactggtggatgaggaatatggcaagggacatgagatgggaaaaattaaataggctgtggtttggaagtctcaaagtgaaattcaaggtgcaaggctcttaaaagttaaatccagcgattcggtacatagcttaggccctattaaatgacccagtgctttaagaactatcttttgaaaggaacacttcacacaagcaccctcaaaaataattagacacctccccatttctctgttaaatggtgaaagacacccaagactagacctaactactgtcaccctctcctggcctcttggcagccaaaaggccacatggcccaggctctccagcatcactgtgtagccgacttggacaaaaatggacttctccccattgccacttgcagatctcttcaaagaatcagcagatctgatagtgtgcccctcttcatccccggcaaccactgttaaaggaaagattgggaaagatcccaccccgccaggagggaggcaaaagcctctgacgctcccctccccccatagctgaccaaggccagggccactgcgggagcaccgcgcgtccacgtgcacccagcatgcccggtcaccctttattacgtaagagtcccaggatggagttgtacctgctgccggcccctcttccccgacggctaataataaacccgggttcctgtttcccggccgcggccactccagattcggggctgaggggctcactctgcaaccaaggcacgtgcattctggtcatcccacgcggggagcgcgcgcaaggcccgcccagcccccacatgccagccccaccctccagtcggtccggacgccgacgcctttttgaccctcgctgtgcccggccctcctcatctggcctgcccagggcttggtgctggcggggtccagctgctccaatccctcctcctctgctctgccctgccctgccctggcctgccccggcgccctccctcagcccgggtatcaggcgagaggcggagctggcccggcgcgccccgcccccgctgtagaaagggccgggcgagtgttactcgcggtcatcccggcctgggccttttatctcggtgctgccgggggaggcgggaggaggagacaccaggggtggccctgagcgccggcgacacctttcctggactataaattgagcacctgggatgggtagggggccaacgcagtcaccgccgtccgcagtcacagtccagccactgaccgcagcagcgcccttgcgtagcagccgcttgcagcgagaacactgaattgccaacgagcaggagagtctcaaggcgcaagaggaggtgggtgcccacgccccatcgctgccccggccagcttggttgcttgagctcaggcttttcggagggagaagttgtggtggtggggggacacccttctccccgcggccgtaggtgggcgaggaggtgggactgcccagccgcggggagccacccaggcgccgtcccggacgagctgtagccagagaagggggtgcgcgcgggcaagggcgccaggccccctagcagggtgaataatctaatctgttctttcgtctccgtgtatcaaacaggccagggctcgacccacagagcaccctcagccatcgcgagtttccgggcgccaaagccaggagaagccgcccatcccgcagggccggtctgccagcgagacgagagttggcgagggcggaggagtgccgggaatcccgccacaccggctatagccaggcccccagcgcgggccttggagagcgcgtgaaggcgggcatccccttgacccggccgaccatccccgtgcccctgcgtccctgcgctccaacgtccgcgcggccaccatgatgcaaatctgcgacacctacaaccagaagcactcgctctttaacgccatgaatcgcttcattggcgccgtgaacaacatggaccagacggtgatggtgcccagcttgctgcgcgacgtgcccctggctgaccccgggttagacaacgatgttggcgtggaggtaggcggcagtggcggctgcctggaggagcgcacgcccccagtccccgactcgggaagcgccaatggcagctttttcgcgccctctcgggacatgtacagccactacgtgcttctcaagtccatccgcaacgacatcgagtggggggtcctgcaccagccgcctccaccggctgggagcgaggagggcagtgcctggaagtccaaggacatcctggtggacctgggccacttggagggtgcggacgccggcgaagaagacctggaacagcagttccactaccacctgcgcgggctgcacactgtgctctcgaaactcacgcgcaaagccaacatcctcactaacagatacaagcaggagatcggcttcggcaattggggccactgaggcgtggcgcccgtggctgcccagcaccttcttcgacccatctcaccctctctcattcctcaaagctttttttttttttcctggctggggggcgggaagggcagactgcaaactggggggctgcgtacgtgcaggaggcgcggtggggctgcgtggaggagggggccacgtgtgagagagaagaaaatggtggccggagatgggagggcccaaggaacctcctgggagggggcctgcattctatgttggtgggaatgggactgggctgacgccctgcattcagcctgtgcctttcctggggtttcttttctgttcttttcggaggagagggcccgagaaggggccataccagggcgcggcgctgggttgccacacttgggaaagcagcccggagctgggtgctggggaaggcggggcgcgtagcctcccgccgccctgcggttgggccggtggaggcccaggcgttgctaggattgcatcagttttcctgtttgcactatttctttttgtaacattggccctgtgtgaagtatttcgaatctcctccttgctctgaaacttcagcgattccattgtgataagcgcacaaacagcactgtctgtcggtaatcggtactactttattaatgattttctgttacactgtatagtagtcctatggcacccccaccccatccctttcgtgccactcccgtccccacccccaccccagtgtgtataagctggcatttcgccagcttgtacgtagcttgccactcagtgaaaataataacattattatgagaaagtggacttaaccgaaatggaaccaactgacattctatcgtgttgtacatagaatgatgaagggttccactgttgttgtatgtcttaaatttatttaaaactttttttaatccagatgtagactatattctaaaaaataaaaaagcaaatgtgtcaactaaattggacaagcgtctggtcctcattaatctgccaatgaatggtttcgtcattaaataaaaatcaatttaattgatttactagc

SEQ ID NO: 10524 - protein, 183 aa, Homo sapiens; identical to SEQ ID NO: 1337

SEQ ID NO: 10525 - DNA, 1906 bp, Homo sapiens
cggaccttttccttctggagtttccccggcgggttcacagtccagccactgaccgcagcagcgcccttgcgtagcagccgcttgcagcgagaacactgaattgccaacgagcaggagagtctcaaggcgcaagaggaggccagggctcgacccacagagcaccctcagccatcgcgagtttccgggcgccaaagccaggagaagccgcccatcccgcagggccggtctgccagcgagacgagagttggcgagggcggaggagtgccgggaatcccgccacaccggctatagccaggcccccagcgcgggccttggagagcgcgtgaaggcgggcatccccttgacccggccgaccatccccgtgcccctgcgtccctgcgctccaacgtccgcgcggccaccatgatgcaaatctgcgacacctacaaccagaagcactcgctctttaacgccatgaatcgcttcattggcgccgtgaacaacatggaccagacggtgatggtgcccagcttgctgcgcgacgtgcccctggctgaccccgggttagacaacgatgttggcgtggaggtaggcggcagtggcggctgcctggaggagcgcacgcccccagtccccgactcgggaagcgccaatggcagctttttcgcgccctctcgggacatgtacagccactacgtgcttctcaagtccatccgcaacgacatcgagtggggggtcctgcaccagccgcctccaccggctgggagcgaggagggcagtgcctggaagtccaaggacatcctggtggacctgggccacttggagggtgcggacgccggcgaagaagacctggaacagcagttccactaccacctgcgcgggctgcacactgtgctctcgaaactcacgcgcaaagccaacatcctcactaacagatacaagcaggagatcggcttcggcaattggggccactgaggcgtggcgcccgtggctgcccagcaccttcttcgacccatctcaccctctctcattcctcaaagctttttttttttttcctggctggggggcgggaagggcagactgcaaactggggggctgcgtacgtgcaggaggcgcggtggggctgcgtggaggagggggccacgtgtgagagagaagaaaatggtggccggagatgggagggcccaaggaacctcctgggagggggcctgcattctatgttggtgggaatgggactgggctgacgccctgcattcagcctgtgcctttcctggggtttcttttctgttcttttcggaggagagggcccgagaaggggccataccagggcgcggcgctgggttgccacacttgggaaagcagcccggagctgggtgctggggaaggcggggcgcgtagcctcccgccgccctgcggttgggccggtggaggcccaggcgttgctaggattgcatcagttttcctgtttgcactatttctttttgtaacattggccctgtgtgaagtatttcgaatctcctccttgctctgaaacttcagcgattccattgtgataagcgcacaaacagcactgtctgtcggtaatcggtactactttattaatgattttctgttacactgtatagtagtcctatggcacccccaccccatccctttcgtgccactcccgtccccacccccaccccagtgtgtataagctggcatttcgccagcttgtacgtagcttgccactcagtgaaaataataacattattatgagaaagtggacttaaccgaaatggaaccaactgacattctatcgtgttgtacatagaatgatgaagggttccactgttgttgtatgtcttaaatttatttaaaactttttttaatccagatgtagactatattctaaaaaataaaaaagcaaatgtgtcaactaaattgg

SEQ ID NO: 10526 - protein, 183 aa, Homo sapiens; identical to SEQ ID NO: 1337

SEQ ID NO: 10527 - DNA, 1984 bp, Homo sapiens
cggaccttttccttctggagtttccccggcgggttcacagtccagccactgaccgcagcagcgcccttgcgtagcagccgcttgcagcgagaacactgaattgccaacgagcaggagagtctcaaggcgcaagaggaggccagggctcgacccacagagcaccctcagccatcgcgagtttccgggcgccaaagccaggagaagccgcccatcccgcagggccggtctgccagcgagacgagagttggcgagggcggaggagtgccgggaatcccgccacaccggctatagccaggcccccagcgcgggccttggagagcgcgtgaaggcgggcatccccttgacccggccgaccatccccgtgcccctgcgtccctgcgctccaacgtccgcgcggccaccatgatgcaaatctgcgacacctacaaccagaagcactcgctctttaacgccatgaatcgcttcattggcgccgtgaacaacatggaccagacggtgatggtgcccagcttgctgcgcgacgtgcccctggctgaccccgggttagacaacgatgttggcgtggaggtaggcggcagtggcggctgcctggaggagcgcacgcccccagtccccgactcgggaagcgccaatggcagctttttcgcgccctctcgggacatgtacagccactacgtgcttctcaagtccatccgcaacgacatcgagtggggggtcctgcaccagccgcctccaccggctgggagcgaggagggcagtgcctggaagtccaaggacatcctggtggacctgggccacttggagggtgcggacgccggcgaagaagacctggaacagcagttccactaccacctgcgcgggctgcacactgtgctctcgaaactcacgcgcaaagccaacatcctcactaacagatacaagcaggagatcggcttcggcaattggggccactgaggcgtggcgcccgtggctgcccagcaccttcttcgacccatctcaccctctctcattcctcaaagctttttttttttttcctggctggggggcgggaagggcagactgcaaactggggggctgcgtacgtgcaggaggcgcggtggggctgcgtggaggagggggccacgtgtgagagagaagaaaatggtggccggagatgggagggcccaaggaacctcctgggagggggcctgcattctatgttggtgggaatgggactgggctgacgccctgcattcagcctgtgcctttcctggggtttcttttctgttcttttcggaggagagggcccgagaaggggccataccagggcgcggcgctgggttgccacacttgggaaagcagcccggagctgggtgctggggaaggcggggcgcgtagcctcccgccgccctgcggttgggccggtggaggcccaggcgttgctaggattgcatcagttttcctgtttgcactatttctttttgtaacattggccctgtgtgaagtatttcgaatctcctccttgctctgaaacttcagcgattccattgtgataagcgcacaaacagcactgtctgtcggtaatcggtactactttattaatgattttctgttacactgtatagtagtcctatggcacccccaccccatccctttcgtgccactcccgtccccacccccaccccagtgtgtataagctggcatttcgccagcttgtacgtagcttgccactcagtgaaaataataacattattatgagaaagtggacttaaccgaaatggaaccaactgacattctatcgtgttgtacatagaatgatgaagggttccactgttgttgtatgtcttaaatttatttaaaactttttttaatccagatgtagactatattctaaaaaataaaaaagcaaatgtgtcaactaaattggacaagcgtctggtcctcattaatctgccaatgaatggtttcgtcattaaataaaaatcaatttaattgatttactagc

SEQ ID NO: 10528 - protein, 183 aa, Homo sapiens; identical to SEQ ID NO: 1337

SEQ ID NO: 10529 - DNA, 375 bp, Homo sapiens
ggccttgcgcgcgctccccgcgtgggatgaccagaatgcacgtgccttggttgcagagtgagcccctcagccccgaatctggagtggccgcggccgggaaacaggaacccgggtttattattagccgtcggggaagaggggccggcagcagttccaacagtgtgataacacacggaaaacggaaatccaagggatctagcaaaaggattccacccagcaaaaacgccagcttgggagagggcccctacctaactccttccttctggcctccacccctcccctgatacgtttccttccgtctagtctcgagataacccttcatcccccagtttcttgactctggccgctgttcttgaacatttcttaaacactttc

SEQ ID NO: 10530 - protein, 85 aa, Homo sapiens
MTRMHVPWLQSEPLSPESGVAAAGKQEPGFIISRRGRGAGSSSNSVITHGKRKSKGSSKRIPPSKNASLGEGPYLTPSFWPPPLP

SEQ ID NO: 10531 - DNA, 453 bp, Homo sapiens
atgggtccaggaagggggacaaagtacgctttaatttatgagaagatcagctactagaaattcagcgattccattgtgataagcgcacaaacagcactgtctgtcggtaatcggtactactttattaatgattttctgttacactgtatagtagtcctatggcacccccaccccatccctttcgtgccactcccgtccccacccccaccccagtgtgtataagctggcatttcgccagcttgtacgtagcttgccactcagtgaaaataataacattattatgagaaagtggacttaaccgaaatggaaccaactgacattctatcgtgttgtacatagaatgatgaagggttccactgttgttgtatgtcttaaatttatttaaaactttttttaatccagatgtagactatattctaaaaaataaaaaagcaaatgtgtcaactaaattgg

SEQ ID NO: 10532 - protein, 41 aa, Homo sapiens
MAPPPHPFRATPVPTPTPVCISWHFASLYVACHSVKIITLL

SEQ ID NO: 10533 - DNA, 531 bp, Homo sapiens
atgggtccaggaagggggacaaagtacgctttaatttatgagaagatcagctactagaaattcagcgattccattgtgataagcgcacaaacagcactgtctgtcggtaatcggtactactttattaatgattttctgttacactgtatagtagtcctatggcacccccaccccatccctttcgtgccactcccgtccccacccccaccccagtgtgtataagctggcatttcgccagcttgtacgtagcttgccactcagtgaaaataataacattattatgagaaagtggacttaaccgaaatggaaccaactgacattctatcgtgttgtacatagaatgatgaagggttccactgttgttgtatgtcttaaatttatttaaaactttttttaatccagatgtagactatattctaaaaaataaaaaagcaaatgtgtcaactaaattggacaagcgtctggtcctcattaatctgccaatgaatggtttcgtcattaaataaaaatcaatttaattgatttactagc

SEQ ID NO: 10534 - protein, 41 aa, Homo sapiens; identical to SEQ ID NO: 10532

SEQ ID NO: 10535 - DNA, 1500 bp, Homo sapiens
gtgtgcccctcttcatccccggcaaccactgttaaaggaaagattgggaaagatcccaccccgccaggagggaggcaaaagcctctgacgctcccctccccccatagctgaccaaggccagggccactgcgggagcaccgcgcgtccacgtgcacccagcatgcccggtcaccctttattacgtaagagtcccaggatggagttgtacctgctgccggcccctcttccccgacggctaataataaacccgggttcctgtttcccggccgcggccactccagattcggggctgaggggctcactctgcaaccaaggcacgtgcattctggtcatcccacgcggggagcgcgcgcaaggcccgcccagcccccacatgccagccccaccctccagtcggtccggacgccgacgcctttttgaccctcgctgtgcccggccctcctcatctggcctgcccagggcttggtgctggcggggtccagctgctccaatccctcctcctctgctctgccctgccctgccctggcctgccccggcgccctccctcagcccgggtatcaggcgagaggcggagctggcccggcgcgccccgcccccgctgtagaaagggccgggcgagtgttactcgcggtcatcccggcctgggccttttatctcggtgctgccgggggaggcgggaggaggagacaccaggggctgcgtggaggagggggccacgtgtgagagagaagaaaatggtggccggagatgggagggcccaaggaacctcctgggagggggcctgcattctatgttggtgggaatgggactgggctgacgccctgcattcagcctgtgcctttcctggggtttcttttctgttcttttcggaggagagggcccgagaaggggccataccagggcgcggcgctgggttgccacacttgggaaagcagcccggagctgggtgctggggaaggcggggcgcgtagcctcccgccgccctgcggttgggccggtggaggcccaggcgttgctaggattgcatcagttttcctgtttgcactatttctttttgtaacattggccctgtgtgaagtatttcgaatctcctccttgctctgaaacttcagcgattccattgtgataagcgcacaaacagcactgtctgtcggtaatcggtactactttattaatgattttctgttacactgtatagtagtcctatggcacccccaccccatccctttcgtgccactcccgtccccacccccaccccagtgtgtataagctggcatttcgccagcttgtacgtagcttgccactcagtgaaaataataacattattatgagaaagtggacttaaccgaaatggaaccaactgacattctatcgtgttgtacatagaatgatgaagggttccactgttgttgtatgtcttaaatttatttaaaactttttttaatccagatgtagactatattctaaaaaataaaaaagcaaatgtgtcaactaaattgg

SEQ ID NO: 10536 - protein, 147 aa, Homo sapiens
MPGHPLLRKSPRMELYLLPAPLPRRLIINPGSCFPAAATPDSGLRGSLCNQGTCILVIPRGERAQGPPSPHMPAPPSSRSGRRRLFDPRCARPSSSGLPRAWCWRGPAAPIPPPLLCPALPWPAPAPSLSPGIRREAELARRAPPPL

SEQ ID NO: 10537 - DNA, 2657 bp, Homo sapiens
gtgtgcccctcttcatccccggcaaccactgttaaaggaaagattgggaaagatcccaccccgccaggagggaggcaaaagcctctgacgctcccctccccccatagctgaccaaggccagggccactgcgggagcaccgcgcgtccacgtgcacccagcatgcccggtcaccctttattacgtaagagtcccaggatggagttgtacctgctgccggcccctcttccccgacggctaataataaacccgggttcctgtttcccggccgcggccactccagattcggggctgaggggctcactctgcaaccaaggcacgtgcattctggtcatcccacgcggggagcgcgcgcaaggcccgcccagcccccacatgccagccccaccctccagtcggtccggacgccgacgcctttttgaccctcgctgtgcccggccctcctcatctggcctgcccagggcttggtgctggcggggtccagctgctccaatccctcctcctctgctctgccctgccctgccctggcctgccccggcgccctccctcagcccgggtatcaggcgagaggcggagctggcccggcgcgccccgcccccgctgtagaaagggccgggcgagtgttactcgcggtcatcccggcctgggccttttatctcggtgctgccgggggaggcgggaggaggagacaccaggggtggccctgagcgccggcgacacctttcctggactataaattgagcacctgggatgggtagggggccaacgcagtcaccgccgtccgcagtcacagtccagccactgaccgcagcagcgcccttgcgtagcagccgcttgcagcgagaacactgaattgccaacgagcaggagagtctcaaggcgcaagaggaggccagggctcgacccacagagcaccctcagccatcgcgagtttccgggcgccaaagccaggagaagccgcccatcccgcagggccggtctgccagcgagacgagagttggcgagggcggaggagtgccgggaatcccgccacaccggctatagccaggcccccagcgcgggccttggagagcgcgtgaaggcgggcatccccttgacccggccgaccatccccgtgcccctgcgtccctgcgctccaacgtccgcgcggccaccatgatgcaaatctgcgacacctacaaccagaagcactcgctctttaacgccatgaatcgcttcattggcgccgtgaacaacatggaccagacggtgatggtgcccagcttgctgcgcgacgtgcccctggctgaccccgggttagacaacgatgttggcgtggaggtaggcggcagtggcggctgcctggaggagcgcacgcccccagtccccgactcgggaagcgccaatggcagctttttcgcgccctctcgggacatgtacagccactacgtgcttctcaagtccatccgcaacgacatcgagtggggggtcctgcaccagccgcctccaccggctgggagcgaggagggcagtgcctggaagtccaaggacatcctggtggacctgggccacttggagggtgcggacgccggcgaagaagacctggaacagcagttccactaccacctgcgcgggctgcacactgtgctctcgaaactcacgcgcaaagccaacatcctcactaacagatacaagcaggagatcggcttcggcaattggggccactgaggcgtggcgcccgtggctgcccagcaccttcttcgacccatctcaccctctctcattcctcaaagctttttttttttttcctggctggggggcgggaagggcagactgcaaactggggggctgcgtacgtgcaggaggcgcggtggggctgcgtggaggagggggccacgtgtgagagagaagaaaatggtggccggagatgggagggcccaaggaacctcctgggagggggcctgcattctatgttggtgggaatgggactgggctgacgccctgcattcagcctgtgcctttcctggggtttcttttctgttcttttcggaggagagggcccgagaaggggccataccagggcgcggcgctgggttgccacacttgggaaagcagcccggagctgggtgctggggaaggcggggcgcgtagcctcccgccgccctgcggttgggccggtggaggcccaggcgttgctaggattgcatcagttttcctgtttgcactatttctttttgtaacattggccctgtgtgaagtatttcgaatctcctccttgctctgaaacttcagcgattccattgtgataagcgcacaaacagcactgtctgtcggtaatcggtactactttattaatgattttctgttacactgtatagtagtcctatggcacccccaccccatccctttcgtgccactcccgtccccacccccaccccagtgtgtataagctggcatttcgccagcttgtacgtagcttgccactcagtgaaaataataacattattatgagaaagtggacttaaccgaaatggaaccaactgacattctatcgtgttgtacatagaatgatgaagggttccactgttgttgtatgtcttaaatttatttaaaactttttttaatccagatgtagactatattctaaaaaataaaaaagcaaatgtgtcaactaaattgg

SEQ ID NO: 10538 - protein, 183 aa, Homo sapiens; identical to SEQ ID NO: 1337

SEQ ID NO: 10539 - DNA, 2172 bp, Homo sapiens
gtgtgcccctcttcatccccggcaaccactgttaaaggaaagattgggaaagatcccaccccgccaggagggaggcaaaagcctctgacgctcccctccccccatagctgaccaaggccagggccactgcgggagcaccgcgcgtccacgtgcacccagcatgcccggtcaccctttattacgtaagagtcccaggatggagttgtacctgctgccggcccctcttccccgacggctaataataaacccgggttcctgtttcccggccgcggccactccagattcggggctgaggggctcactctgcaaccaaggcacgtgcattctggtcatcccacgcggggagcgcgcgcaaggcccgcccagcccccacatgccagccccaccctccagtcggtccggacgccgacgcctttttgaccctcgctgtgcccggccctcctcatctggcctgcccagggcttggtgctggcggggtccagctgctccaatccctcctcctctgctctgccctgccctgccctggcctgccccggcgccctccctcagcccgggtatcaggcgagaggcggagctggcccggcgcgccccgcccccgctgtagaaagggccgggcgagtgttactcgcggtcatcccggcctgggccttttatctcggtgctgccgggggaggcgggaggaggagacaccaggggtggccctgagcgccggcgacacctttcctggactataaattgagcacctgggatgggtagggggccaacgcagtcaccgccgtccgcagtcacagtccagccatgaccccgggttagacaacgatgttggcgtggaggtaggcggcagtggcggctgcctggaggagcgcacgcccccagtccccgactcgggaagcgccaatggcagctttttcgcgccctctcgggacatgtacagccactacgtgcttctcaagtccatccgcaacgacatcgagtggggggtcctgcaccagccgcctccaccggctgggagcgaggagggcagtgcctggaagtccaaggacatcctggtggacctgggccacttggagggtgcggacgccggcgaagaagacctggaacagcagttccactaccacctgcgcgggctgcacactgtgctctcgaaactcacgcgcaaagccaacatcctcactaacagatacaagcaggagatcggcttcggcaattggggccactgaggcgtggcgcccgtggctgcccagcaccttcttcgacccatctcaccctctctcattcctcaaagctttttttttttttcctggctggggggcgggaagggcagactgcaaactggggggctgcgtacgtgcaggaggcgcggtggggctgcgtggaggagggggccacgtgtgagagagaagaaaatggtggccggagatgggagggcccaaggaacctcctgggagggggcctgcattctatgttggtgggaatgggactgggctgacgccctgcattcagcctgtgcctttcctggggtttcttttctgttcttttcggaggagagggcccgagaaggggccataccagggcgcggcgctgggttgccacacttgggaaagcagcccggagctgggtgctggggaaggcggggcgcgtagcctcccgccgccctgcggttgggccggtggaggcccaggcgttgctaggattgcatcagttttcctgtttgcactatttctttttgtaacattggccctgtgtgaagtatttcgaatctcctccttgctctgaaacttcagcgattccattgtgataagcgcacaaacagcactgtctgtcggtaatcggtactactttattaatgattttctgttacactgtatagtagtcctatggcacccccaccccatccctttcgtgccactcccgtccccacccccaccccagtgtgtataagctggcatttcgccagcttgtacgtagcttgccactcagtgaaaataataacattattatgagaaagtggacttaaccgaaatggaaccaactgacattctatcgtgttgtacatagaatgatgaagggttccactgttgttgtatgtcttaaatttatttaaaactttttttaatccagatgtagactatattctaaaaaataaaaaagcaaatgtgtcaactaaattgg

SEQ ID NO: 10540 - protein, 165 aa, Homo sapiens
MAAFSRPLGTCTATTCFSSPSATTSSGGSCTSRLHRLGARRAVPGSPRTSWWTWATWRVRTPAKKTWNSSSTTTCAGCTLCSRNSRAKPTSSLTDTSRRSASAIGATEAWRPWLPSTFFDPSHPLSFLKAFFFFPGWGAGRADCKLGGCVRAGGAVGLRGGGGHV

SEQ ID NO: 10541 - DNA, 2250 bp, Homo sapiens
gtgtgcccctcttcatccccggcaaccactgttaaaggaaagattgggaaagatcccaccccgccaggagggaggcaaaagcctctgacgctcccctccccccatagctgaccaaggccagggccactgcgggagcaccgcgcgtccacgtgcacccagcatgcccggtcaccctttattacgtaagagtcccaggatggagttgtacctgctgccggcccctcttccccgacggctaataataaacccgggttcctgtttcccggccgcggccactccagattcggggctgaggggctcactctgcaaccaaggcacgtgcattctggtcatcccacgcggggagcgcgcgcaaggcccgcccagcccccacatgccagccccaccctccagtcggtccggacgccgacgcctttttgaccctcgctgtgcccggccctcctcatctggcctgcccagggcttggtgctggcggggtccagctgctccaatccctcctcctctgctctgccctgccctgccctggcctgccccggcgccctccctcagcccgggtatcaggcgagaggcggagctggcccggcgcgccccgcccccgctgtagaaagggccgggcgagtgttactcgcggtcatcccggcctgggccttttatctcggtgctgccgggggaggcgggaggaggagacaccaggggtggccctgagcgccggcgacacctttcctggactataaattgagcacctgggatgggtagggggccaacgcagtcaccgccgtccgcagtcacagtccagccatgaccccgggttagacaacgatgttggcgtggaggtaggcggcagtggcggctgcctggaggagcgcacgcccccagtccccgactcgggaagcgccaatggcagctttttcgcgccctctcgggacatgtacagccactacgtgcttctcaagtccatccgcaacgacatcgagtggggggtcctgcaccagccgcctccaccggctgggagcgaggagggcagtgcctggaagtccaaggacatcctggtggacctgggccacttggagggtgcggacgccggcgaagaagacctggaacagcagttccactaccacctgcgcgggctgcacactgtgctctcgaaactcacgcgcaaagccaacatcctcactaacagatacaagcaggagatcggcttcggcaattggggccactgaggcgtggcgcccgtggctgcccagcaccttcttcgacccatctcaccctctctcattcctcaaagctttttttttttttcctggctggggggcgggaagggcagactgcaaactggggggctgcgtacgtgcaggaggcgcggtggggctgcgtggaggagggggccacgtgtgagagagaagaaaatggtggccggagatgggagggcccaaggaacctcctgggagggggcctgcattctatgttggtgggaatgggactgggctgacgccctgcattcagcctgtgcctttcctggggtttcttttctgttcttttcggaggagagggcccgagaaggggccataccagggcgcggcgctgggttgccacacttgggaaagcagcccggagctgggtgctggggaaggcggggcgcgtagcctcccgccgccctgcggttgggccggtggaggcccaggcgttgctaggattgcatcagttttcctgtttgcactatttctttttgtaacattggccctgtgtgaagtatttcgaatctcctccttgctctgaaacttcagcgattccattgtgataagcgcacaaacagcactgtctgtcggtaatcggtactactttattaatgattttctgttacactgtatagtagtcctatggcacccccaccccatccctttcgtgccactcccgtccccacccccaccccagtgtgtataagctggcatttcgccagcttgtacgtagcttgccactcagtgaaaataataacattattatgagaaagtggacttaaccgaaatggaaccaactgacattctatcgtgttgtacatagaatgatgaagggttccactgttgttgtatgtcttaaatttatttaaaactttttttaatccagatgtagactatattctaaaaaataaaaaagcaaatgtgtcaactaaattggacaagcgtctggtcctcattaatctgccaatgaatggtttcgtcattaaataaaaatcaatttaattgatttactagc

SEQ ID NO: 10542 - protein, 165 aa, Homo sapiens; identical to SEQ ID NO: 10540

SEQ ID NO: 10543 - DNA, 1578 bp, Homo sapiens
gtgtgcccctcttcatccccggcaaccactgttaaaggaaagattgggaaagatcccaccccgccaggagggaggcaaaagcctctgacgctcccctccccccatagctgaccaaggccagggccactgcgggagcaccgcgcgtccacgtgcacccagcatgcccggtcaccctttattacgtaagagtcccaggatggagttgtacctgctgccggcccctcttccccgacggctaataataaacccgggttcctgtttcccggccgcggccactccagattcggggctgaggggctcactctgcaaccaaggcacgtgcattctggtcatcccacgcggggagcgcgcgcaaggcccgcccagcccccacatgccagccccaccctccagtcggtccggacgccgacgcctttttgaccctcgctgtgcccggccctcctcatctggcctgcccagggcttggtgctggcggggtccagctgctccaatccctcctcctctgctctgccctgccctgccctggcctgccccggcgccctccctcagcccgggtatcaggcgagaggcggagctggcccggcgcgccccgcccccgctgtagaaagggccgggcgagtgttactcgcggtcatcccggcctgggccttttatctcggtgctgccgggggaggcgggaggaggagacaccaggggctgcgtggaggagggggccacgtgtgagagagaagaaaatggtggccggagatgggagggcccaaggaacctcctgggagggggcctgcattctatgttggtgggaatgggactgggctgacgccctgcattcagcctgtgcctttcctggggtttcttttctgttcttttcggaggagagggcccgagaaggggccataccagggcgcggcgctgggttgccacacttgggaaagcagcccggagctgggtgctggggaaggcggggcgcgtagcctcccgccgccctgcggttgggccggtggaggcccaggcgttgctaggattgcatcagttttcctgtttgcactatttctttttgtaacattggccctgtgtgaagtatttcgaatctcctccttgctctgaaacttcagcgattccattgtgataagcgcacaaacagcactgtctgtcggtaatcggtactactttattaatgattttctgttacactgtatagtagtcctatggcacccccaccccatccctttcgtgccactcccgtccccacccccaccccagtgtgtataagctggcatttcgccagcttgtacgtagcttgccactcagtgaaaataataacattattatgagaaagtggacttaaccgaaatggaaccaactgacattctatcgtgttgtacatagaatgatgaagggttccactgttgttgtatgtcttaaatttatttaaaactttttttaatccagatgtagactatattctaaaaaataaaaaagcaaatgtgtcaactaaattggacaagcgtctggtcctcattaatctgccaatgaatggtttcgtcattaaataaaaatcaatttaattgatttactagc

SEQ ID NO: 10544 - protein, 147 aa, Homo sapiens; identical to SEQ ID NO: 10536

SEQ ID NO: 10545 - DNA, 2735 bp, Homo sapiens
gtgtgcccctcttcatccccggcaaccactgttaaaggaaagattgggaaagatcccaccccgccaggagggaggcaaaagcctctgacgctcccctccccccatagctgaccaaggccagggccactgcgggagcaccgcgcgtccacgtgcacccagcatgcccggtcaccctttattacgtaagagtcccaggatggagttgtacctgctgccggcccctcttccccgacggctaataataaacccgggttcctgtttcccggccgcggccactccagattcggggctgaggggctcactctgcaaccaaggcacgtgcattctggtcatcccacgcggggagcgcgcgcaaggcccgcccagcccccacatgccagccccaccctccagtcggtccggacgccgacgcctttttgaccctcgctgtgcccggccctcctcatctggcctgcccagggcttggtgctggcggggtccagctgctccaatccctcctcctctgctctgccctgccctgccctggcctgccccggcgccctccctcagcccgggtatcaggcgagaggcggagctggcccggcgcgccccgcccccgctgtagaaagggccgggcgagtgttactcgcggtcatcccggcctgggccttttatctcggtgctgccgggggaggcgggaggaggagacaccaggggtggccctgagcgccggcgacacctttcctggactataaattgagcacctgggatgggtagggggccaacgcagtcaccgccgtccgcagtcacagtccagccactgaccgcagcagcgcccttgcgtagcagccgcttgcagcgagaacactgaattgccaacgagcaggagagtctcaaggcgcaagaggaggccagggctcgacccacagagcaccctcagccatcgcgagtttccgggcgccaaagccaggagaagccgcccatcccgcagggccggtctgccagcgagacgagagttggcgagggcggaggagtgccgggaatcccgccacaccggctatagccaggcccccagcgcgggccttggagagcgcgtgaaggcgggcatccccttgacccggccgaccatccccgtgcccctgcgtccctgcgctccaacgtccgcgcggccaccatgatgcaaatctgcgacacctacaaccagaagcactcgctctttaacgccatgaatcgcttcattggcgccgtgaacaacatggaccagacggtgatggtgcccagcttgctgcgcgacgtgcccctggctgaccccgggttagacaacgatgttggcgtggaggtaggcggcagtggcggctgcctggaggagcgcacgcccccagtccccgactcgggaagcgccaatggcagctttttcgcgccctctcgggacatgtacagccactacgtgcttctcaagtccatccgcaacgacatcgagtggggggtcctgcaccagccgcctccaccggctgggagcgaggagggcagtgcctggaagtccaaggacatcctggtggacctgggccacttggagggtgcggacgccggcgaagaagacctggaacagcagttccactaccacctgcgcgggctgcacactgtgctctcgaaactcacgcgcaaagccaacatcctcactaacagatacaagcaggagatcggcttcggcaattggggccactgaggcgtggcgcccgtggctgcccagcaccttcttcgacccatctcaccctctctcattcctcaaagctttttttttttttcctggctggggggcgggaagggcagactgcaaactggggggctgcgtacgtgcaggaggcgcggtggggctgcgtggaggagggggccacgtgtgagagagaagaaaatggtggccggagatgggagggcccaaggaacctcctgggagggggcctgcattctatgttggtgggaatgggactgggctgacgccctgcattcagcctgtgcctttcctggggtttcttttctgttcttttcggaggagagggcccgagaaggggccataccagggcgcggcgctgggttgccacacttgggaaagcagcccggagctgggtgctggggaaggcggggcgcgtagcctcccgccgccctgcggttgggccggtggaggcccaggcgttgctaggattgcatcagttttcctgtttgcactatttctttttgtaacattggccctgtgtgaagtatttcgaatctcctccttgctctgaaacttcagcgattccattgtgataagcgcacaaacagcactgtctgtcggtaatcggtactactttattaatgattttctgttacactgtatagtagtcctatggcacccccaccccatccctttcgtgccactcccgtccccacccccaccccagtgtgtataagctggcatttcgccagcttgtacgtagcttgccactcagtgaaaataataacattattatgagaaagtggacttaaccgaaatggaaccaactgacattctatcgtgttgtacatagaatgatgaagggttccactgttgttgtatgtcttaaatttatttaaaactttttttaatccagatgtagactatattctaaaaaataaaaaagcaaatgtgtcaactaaattggacaagcgtctggtcctcattaatctgccaatgaatggtttcgtcattaaataaaaatcaatttaattgatttactagc

SEQ ID NO: 10546 - protein, 183 aa, Homo sapiens; identical to SEQ ID NO: 1337

SEQ ID NO: 10547 - DNA, 1231 bp, Homo sapiens
gagaagggggtgcgcgcgggcaagggcgccaggccccctagcagggtgaataatctaatctgttctttcgtctccgtgtatcaaacaggccagggctcgacccacagagcaccctcagccatcgcgagtttccgggcgccaaagccaggagaagccgcccatcccgcagggccggtctgccagcgagacgagagttggcgagggcggaggagtgccgggaatcccgccacaccggctatagccaggcccccagcgcgggccttggagagcgcgtgaaggcgggcatccccttgacccggccgaccatccccgtgcccctgcgtccctgcgctccaacgtccgcgcggccaccatgatgcaaatctgcgacacctacaaccagaagcactcgctctttaacgccatgaatcgcttcattggcgccgtgaacaacatggaccagacggtgatggtgcccagcttgctgcgcgacgtgcccctggctgaccccgggttagacaacgatgttggcgtggaggtaggcggcagtggcggctgcctggaggagcgcacgcccccagtccccgactcgggaagcgccaatggcagctttttcgcgccctctcgggacatgtacagccactacgtgcttctcaagtccatccgcaacgacatcgagtggggggtcctgcaccagccgcctccaccggctgggagcgaggagggcagtgcctggaagtccaaggacatcctggtggacctgggccacttggagggtgcggacgccggcgaagaagacctggaacagcagttccactaccacctgcgcgggctgcacactgtgctctcgaaactcacgcgcaaagccaacatcctcactaacagatacaagcaggagatcggcttcggcaattggggccactgaggcgtggcgcccgtggctgcccagcaccttcttcgacccatctcaccctctctcattcctcaaagctttttttttttttcctggctgtgtgtataagctggcatttcgccagcttgtacgtagcttgccactcagtgaaaataataacattattatgagaaagtggacttaaccgaaatggaaccaactgacattctatcgtgttgtacatagaatgatgaagggttccactgttgttgtatgtcttaaatttatttaaaactttttttaatccagatgtagactatattctaaaaaataaaaaagcaaatgtgtcaactaaattgg

SEQ ID NO: 10548 - protein, 164 aa, Homo sapiens
MAAFSRPLGTCTATTCFSSPSATTSSGGSCTSRLHRLGARRAVPGSPRTSWWTWATWRVRTPAKKTWNSSSTTTCAGCTLCSRNSRAKPTSSLTDTSRRSASAIGATEAWRPWLPSTFFDPSHPLSFLKAFFFFPGCVYKLAFRQLVRSLPLSENNNIIMRKWT

SEQ ID NO: 10549 - DNA, 530 bp, Homo sapiens
ataatgacaaagaacatgagtgagactatgtaaataggattgcttatggataaatccacatccttataaatgtcaaaggacagctcactgtgaggatggacttgttgcgaggaatgataaaattattgcaaatttctttcaagggaggagcttccacagatctgggcttcctgcagataaaagaggctttataatcttcaaacgaagcatgaaattttgagctgaaagaggccgtgtagtgcaaatgaagatgggaatggttgggatggtagaccaattacaaggagcttgaacgttcttggtcagcatctctcggacagcgggtacttctggtggccacagagggtcttttcatcaccaatcttccattccagctgagatgaggtcttttattttaacctgaaaataaaagccctttccctgaagacagtacctgccatcatgttaatttcttcaaaaaggaaagaagaacaaaaaggaaagacttacagggtcttgggaagattataaaactcattaaaagttcattt

SEQ ID NO: 10550 - protein, 32 aa, Homo sapiens
MDLLRGMIKLLQISFKGGASTDLGFLQIKEAL

SEQ ID NO: 10551 - DNA, 766 bp, Homo sapiens
gccatcatgtaagaagagcctttcacctcccgccgtgattctgaggcttccccagccacgtggaactgttccacttcccacaacacctctgccaccaaccaattgagggtcttcaggagaagtgttcttatctgtgcaatagagcctgccagaaggggcacctggcaaccctcttcagaggcttgatcctgtgctgcagaaacctatggacctgctcaacctgtgcactggaattccagggatagactgagctgtccctaggaggctgggagcattctccagcagagaccagcaactgcctcctgcctggagaatctggaaggaggaagggcggctggaatcacctgtgatgactccagtgtgtcagagaagacaggaagaccaagaaacagccaaggagaggggctgaggaatgagagatggaggagacaacagattgtccttcccattgccaaaccttaggccgggcctgaggggatcagactgggcaattgaatcctcaaaggttcctggaaggactacttaggaattgaatgtgctgagacttcctctcaaaggagcccctccttcttaaatgaatccaggagagaagttctgaagactgtggtctatgctaaaggaatgcagatatttataaatggtcatctgcattgaatgaaccaagtccaaatgacaatcaaggagaactgtaaacataggaaaagagggctgaacccatgcttccagggaaggaagaagagagagagaaagagaagagaagagagag

SEQ ID NO: 10552 - protein, 37 aa, Homo sapiens
MRDGGDNRLSFPLPNLRPGLRGSDWAIESSKVPGRTT

SEQ ID NO: 10553 - DNA, 2228 bp, Homo sapiens
attcaatctgtgaggtggatgcgtgttggaaggaccccttttggtttctttttgctcagagctttcttttaataaattccgctctcctcacctttcaatgtgtccgtatgcctaatttttcctggtcctgtgacaagaacctgattttagctgaactaaggagcgaaagatcctggatcattttggtgacccatactggtacatgaggaaagctcctattccagattctcagagtatagattctgactggattaccctggtccttgaagtatacctaggagatggaataacattgtataagcatccacgttgtcattaagaggaaagagtttccattaaaacagcaggtcacaaaaccctcctgtgagaggaaccctctgtggaagaacagaatatgtcaccccaaaatatgaagaattgttgagctgaagatgattaagaagaagcggatgcaggaaagctctctgctctccctctatttgcttaaaagcaggataaacacttacaaagactaaagacgccacaatcaagaactcagaagggtagaagaaaaagatagtttcccttccctacacaggtgttgatcccttcataaatattatgcatgctaagccctatctcaaggtctacatccaggagaacccaacctgcaacattaagttactgactgtgcaagaaccctttgatcacgtaccttacagaccaagataagtgaggatgcccatgtataacctgctgtctttctggtctcttatgtttttgtaccagaaagggacaactttttgggtaaccataggtctctagtatatctgtgattacaataaagatttttgatataccaaaactgatgaaccaaaattccactgaaatagcgagtaaatggagttcttttatcctttgcagtataccagggtgaactttttacatgatttcttgctccaaagggagaagtgttatgacaaagtacatttaaggaccctaactgatcacagaaaaaatattaatggcattgggaaaaaaatgcagactaatgaatccactactaaattttatctatcttgtagctctaaaattgcactgtttagaatacactatggtagccactagacatatggctacttgaacttgaattggttaaaatcaaaattaagaatttaatttctcactcacattagccacatttcaagtgctcaacagacacatgtggctagtgtctaccatattggacagcatagatttaaagcacatttccatcattgcaacactgcaatatggaggatgtatcctcaatacattgatattgccccctcaaaattcataacccctagatatcttatctctgtatgtgaggatagtgtattaacttgcacctggactgagatagataaatgcttatctccagagatgtctgaaagtctggtactgacccttgtctaagataaggatggaatgtgctggttaatgatttatactgtgctatacaaagtccaaaattcctttggaggtatcctctgctggcttgtctacattgtttaaggatggataggttgatggtttgcacctgctttaatcatttacacattctgattttatttgtgatcagtggaggataaaaccttcaataaacttgtgtcttagcttccttgatattaagatatcttgcacatatcttagatttttataatctgaatgcaaagcacatcctttgcaattgagaaaggactctgtgagctgctcctggatatgtgaaacccctcagtgactgaccgtattttctttcttctgctgtacttgcccttattaaagccttacatgtgaagtaagtcctttcaattgtctgactccgggtgattgttataccctttgatatagtttggatatttgtgccttccaaatctcatgttgaaatgcgatcccctatgttggaggtggagcctagtaggaggtgttagggtcacgggaatggatccctgatgaatggcttggtacacagtaatgagtgagtttgtgctttattagttactgtgagatttacttggtaaaaagagcctggcaactcctccctctcccttgctccctctcttgccatgtgacatgcttgctccagctgcaccttttgccacaattgtaagctttgtgagtccctcaacagaagctgagcaaatgctggcaccatgcttcttgtacagcctacagaactgtgaaccaaataaaacttttatttttat

SEQ ID NO: 10554 - protein, 38 aa, Homo sapiens
MRKAPIPDSQSIDSDWITLVLEVYLGDGITLYKHPRCH

SEQ ID NO: 10555 - DNA, 500 bp, Homo sapiens
aatctgtgaggtggatgcgtgttggaaggaccccttttggtttctttttgctcagagctttcttttaataaattccgctctcctcacctttcaatgtgtccgtatgcctaatttttcctggtcctgtgacaagaacctgattttagctgaactaaggagcgaaagatcctggatcattttggtgacccatactggtacatgaggaaagagttcagtacagactgacacaagattatcttagctcctattccagattctcagagtatagattctgactggattaccctggtccttgaagtatacctaggagatggaataacattgtataagcatccacgttgtcattaagaggaaagagtttccattaaaacagcaggtcacaaaaccctcctgtgagaggaaccctctgtggaagaacagaatatgtcaccccaaaatatgaagaattgttgagctgaagatgattaagaagaagcggatgcaggaaagctctctgctct

SEQ ID NO: 10556 - protein, 32 aa, Homo sapiens
MPNFSWSCDKNLILAELRSERSWIILVTHTGT

SEQ ID NO: 10557 - DNA, 755 bp, Homo sapiens
agggttggccttgcgttcgcctgagcaagggagtagacagcacagcggcagcggagggagtctatgcgagctggacagcagtgggaggtttgtgaggctcgcactggccgcagaccctcgggctcgatcgcccgggagccaggactcggcgacgcgaggctgccgggctacccggccgaggcttcgggggcgcaaactaatgggactggctcgctcggcagcatctccccgctcttctaagtacactgagcagggcccgcgctgaagtagaagctgtccgggggcgcgtagcccggagtcccagtgtggcccggaggaacggagcccgtgccagggcggcccagtcgggagcccggggaccgagcttgtgctgtggggaaacccccacttcttccaagggacagcgatcccgggacggtcgaggcgtcggggcggtcaccgagacctctgcgggaagaccccgtcggggagagggcgcgcagccccgaagcgtctcgggaagtcgagcggaatcgggcgggatcacccgggggcgcagagcccccgtcgcgcctcgtgcggcagcggagagcccaggagaacgagccctcgggggccgaagcccatgcccggcagaagcagggcggccctatgagtactacaagctgtacctggtgcggcctgagcaggcagctgcctgtagcacagttctcgaccccaacgtgttggtcacctgcaataggccagagcaggaaatacgctttaccatcaagttc

SEQ ID NO: 10558 - protein, 58 aa, Homo sapiens [sequence omitted]

SEQ ID NO: 10559 - DNA, 3261 bp, Homo sapiens
agggttggccttgcgttcgcctgagcaagggagtagacagcacagcggcagcggagggagtctatgcgagctggacagcagtgggaggtttgtgaggctcgcactggccgcagaccctcgggctcgatcgcccgggagccaggactcggcgacgcgaggctgccgggctacccggccgaggcttcgggggcgcaaactaatgggactggctcgctcggcagcatctccccgctcttctaagtacactgagcagggcccgcgctgaagtagaagctgtccgggggcgcgtagcccggagtcccagtgtggcccggaggaacggagcccgtgccagggcggcccagtcgggagcccggggaccgagcttgtgctgtggggaaacccccacttcttccaagggacagcgatcccgggacggtcgaggcgtcggggcggtcaccgagacctctgcgggaagaccccgtcggggagagggcgcgcagccccgaagcgtctcgggaagtcgagcggaatcgggcgggatcacccgggggcgcagagcccccgtcgcgcctcgtgcggcagcggagagcccaggagaacgagccctcgggggccgaagcccatgcccgggttgggggcggctgcccagtgagtcctcctggccggccgggcggagaagagcgacaccgaagccggcgggaggggagcacttcaaggccggcggctgcggaggatgggcgcctgagcggctccgagcgcagcgcggcagaggaaggcgaggcgagctttggtgaggaggcgccaagggatcccgaagtgcagtctgcccccgggaagatggctcggcctgggcagcgttggctcggcaagtggcttgtggcgatggtcgtgtgggcgctgtgccggctcgccacaccgctggccaagaacctggagcccgtatcctggagctccctcaaccccaagttcctgagtgggaagggcttggtgatctatccgaaaattggagacaagctggacatcatctgcccccgagcagaagcagggcggccctatgagtactacaagctgtacctggtgcggcctgagcaggcagctgcctgtagcacagttctcgaccccaacgtgttggtcacctgcaataggccagagcaggaaatacgctttaccatcaagttccaggagttcagccccaactacatgggcctggagttcaagaagcaccatgattactacattacctcaacatccaatggaagcctggaggggctggaaaaccgggagggcggtgtgtgccgcacacgcaccatgaagatcatcatgaaggttgggcaagatcccaatgctgtgacgcctgagcagctgactaccagcaggcccagcaaggaggcagacaacactgtcaagatggccacacaggcccctggtagtcggggctccctgggtgactctgatggcaagcatgagactgtgaaccaggaagagaagagtggcccaggtgcaagtgggggcagcagcggggaccctgatggcttcttcaactccaaggtggcattgttcgcggctgtcggtgccggttgcgtcatcttcctgctcatcatcatcttcctgacggtcctactactgaagctacgcaagcggcaccgcaagcacacacagcagcgggcggctgccctctcgctcagtaccctggccagtcccaaggggggcagtggcacagcgggcaccgagcccagcgacatcatcattcccttacggactacagagaacaactactgcccccactatgagaaggtgagtggggactacgggcaccctgtctacatcgtccaagagatgccgccccagagcccggcgaacatctactacaaggtctgagtgcccggcacggcctcaggcccccgagggacagtcggcctggaccggacctctcctttcgcccccacaccccctccccttgccagctgtgcccacctttgtatttagttttgtagtttcttggcttttataatccccctttttccctgccccctgggcttcggaggggggtgcttgtgcccctaacccccatgctcttgtgccttccccctctggccaggcctctgggctccgtgggggcgccccttcttggaaggcagggctggacactgatggacagcaggcagggagacagtcccctggccctgcccctccctcgccccccttgccaccttcccaggactgcttgtccgctatcatcactgtttttaatgcttttgtgttcattttttagctgtcaactcattttcatctgttttttgaagaaaaatggaaaaatgtaaaaggcagcccctccccaggctttgtgagcctggcccaagccagtacaagagggcctggggcacgatgtggtcagccaggaagcataggatgccatttcttttatagattccttggtatttctggtggggtaaggggcaggccagggctgttcacgcccatgagggaagaggaaagtgccactgggcaaggtgtcccaccctcccctcctgaccctcctacgaggcttatcctggcaatggggtagtcactgccacccttccacacacacacacacacacacacacacaaaaaaaaatcccttccttgtgggattcttgggcatctcctgcctccctcactctcacggtaattaatgtcttaattggctgttgcctggggaacaggagagctgctgcaggcagatgacctcatggggggtggagggaggtgaggtgcccaggtggctatttgccctgcagagctgggagtttcacccccaccccccaccctgttctctccttacctttggcatcctttggcctggtggggaaacagaggcccagggtggagacctaagcgggtataagaccaggtggcctgctccttttctgggccctagcacaggtgggtaacccccacccaacccagctcctgctgctgtcccagtcttgggctggggcctggaaagaggaagaggctgcctggggctgggccagcccgctgtgcactttgaccccagttccttgccagcacggctgctaacagactgccacttgagtgcgccttgcaggcactcccagagcagccatggaaggagctggccctcacaccatccacctccacactgcctcctggccagctgcccaccccagtgccaggtgggagagggagcagaacagccagccccttccaggtggcagtcggaagggtttttgtttttgtttctgttgccatttgtgtaaatactagtctttttgg

SEQ ID NO: 10560 - protein, 346 aa, Homo sapiens; identical to SEQ ID NO: 1339

SEQ ID NO: 10561 - DNA, 3326 bp, Homo sapiens
agggttggccttgcgttcgcctgagcaagggagtagacagcacagcggcagcggagggagtctatgcgagctggacagcagtgggaggtttgtgaggctcgcactggccgcagaccctcgggctcgatcgcccgggagccaggactcggcgacgcgaggctgccgggctacccggccgaggcttcgggggcgcaaactaatgggactggctcgctcggcagcatctccccgctcttctaagtacactgagcagggcccgcgctgaagtagaagctgtccgggggcgcgtagcccggagtcccagtgtggcccggaggaacggagcccgtgccagggcggcccagtcgggagcccggggaccgagcttgtgctgtggggaaacccccacttcttccaagggacagcgatcccgggacggtcgaggcgtcggggcggtcaccgagacctctgcgggaagaccccgtcggggagagggcgcgcagccccgaagcgtctcgggaagtcgagcggaatcgggcgggatcacccgggggcgcagagcccccgtcgcgcctcgtgcggcagcggagagcccaggagaacgagccctcgggggccgaagcccatgcccgggttgggggcggctgcccagtgagtcctcctggccggccgggcggagaagagcgacaccgaagccggcgggaggggagcacttcaaggccggcggctgcggaggatgggcgcctgagcggctccgagcgcagcgcggcagaggaaggcgaggcgagctttggtgaggaggcgccaagggatcccgaagtgcagtctgcccccgggaagatggctcggcctgggcagcgttggctcggcaagtggcttgtggcgatggtcgtgtgggcgctgtgccggctcgccacaccgctggccaagaacctggagcccgtatcctggagctccctcaaccccaagttcctgagtgggaagggcttggtgatctatccgaaaattggagacaagctggacatcatctgcccccgagcagaagcagggcggccctatgagtactacaagctgtacctggtgcggcctgagcaggcagctgcctgtagcacagttctcgaccccaacgtgttggtcacctgcaataggccagagcaggaaatacgctttaccatcaagttccaggagttcagccccaactacatgggcctggagttcaagaagcaccatgattactacattacctcaacatccaatggaagcctggaggggctggaaaaccgggagggcggtgtgtgccgcacacgcaccatgaagatcatcatgaaggttgggcaagatcccaatgctgtgacgcctgagcagctgactaccagcaggcccagcaaggaggcagacaacactgtcaagatggccacacaggcccctggtagtcggggctccctgggtgactctgatggcaagcatgagactgtgaaccaggaagagaagagtggcccaggtgcaagtgggggcagcagcggggaccctgatggcttcttcaactccaaggtggcattgttcgcggctgtcggtgccggttgcgtcatcttcctgctcatcatcatcttcctgacggtcctactactgaagctacgcaagcggcaccgcaagcacacacagcagcgggcggctgccctctcgctcagtaccctggccagtcccaaggggggcagtggcacagcgggcaccgagcccagcgacatcatcattcccttacggactacagagaacaactactgcccccactatgagaaggtgagtggggactacgggcaccctgtctacatcgtccaagagatgccgccccagagcccggcgaacatctactacaaggtctgagtgcccggcacggcctcaggcccccgagggacagtcggcctggaccggacctctcctttcgcccccacaccccctccccttgccagctgtgcccacctttgtatttagttttgtagtttcttggcttttataatccccctttttccctgccccctgggcttcggaggggggtgcttgtgcccctaacccccatgctcttgtgccttccccctctggccaggcctctgggctccgtgggggcgccccttcttggaaggcagggctggacactgatggacagcaggcagggagacagtcccctggccctgcccctccctcgccccccttgccaccttcccaggactgcttgtccgctatcatcactgtttttaatgcttttgtgttcattttttagctgtcaactcattttcatctgttttttgaagaaaaatggaaaaatgtaaaaggcagcccctccccaggctttgtgagcctggcccaagccagtacaagagggcctggggcacgatgtggtcagccaggaagcataggatgccatttcttttatagattccttggtatttctggtggggtaaggggcaggccagggctgttcacgcccatgagggaagaggaaagtgccactgggcaaggtgtcccaccctcccctcctgaccctcctacgaggcttatcctggcaatggggtagtcactgccacccttccacacacacacacacacacacacacacaaaaaaaaatcccttccttgtgggattcttgggcatctcctgcctccctcactctcacggtaattaatgtcttaattggctgttgcctggggaacaggagagctgctgcaggcagatgacctcatggggggtggagggaggtgaggtgcccaggtggctatttgccctgcagagctgggagtttcacccccaccccccaccctgttctctccttacctttggcatcctttggcctggtggggaaacagaggcccagggtggagacctaagcgggtataagaccaggtggcctgctccttttctgggccctagcacaggtgggtaacccccacccaacccagctcctgctgctgtcccagtcttgggctggggcctggaaagaggaagaggctgcctggggctgggccagcccgctgtgcactttgaccccagttccttgccagcacggctgctaacagactgccacttgagtgcgccttgcaggcactcccagagcagccatggaaggagctggccctcacaccatccacctccacactgcctcctggccagctgcccaccccagtgccaggtgggagagggagcagaacagccagccccttccaggtggcagtcggaagggtttttgtttttgtttctgttgccatttgtgtaaatactagtctttttggaaaaaaaataatgtaaagatgttttgtataaactctgaattattttcttgttgcttttttcttag

SEQ ID NO: 10562 - protein, 346 aa, Homo sapiens; identical to SEQ ID NO: 1339

SEQ ID NO: 10563 - DNA, 3374 bp, Homo sapiens
agggttggccttgcgttcgcctgagcaagggagtagacagcacagcggcagcggagggagtctatgcgagctggacagcagtgggaggtttgtgaggctcgcactggccgcagaccctcgggctcgatcgcccgggagccaggactcggcgacgcgaggctgccgggctacccggccgaggcttcgggggcgcaaactaatgggactggctcgctcggcagcatctccccgctcttctaagtacactgagcagggcccgcgctgaagtagaagctgtccgggggcgcgtagcccggagtcccagtgtggcccggaggaacggagcccgtgccagggcggcccagtcgggagcccggggaccgagcttgtgctgtggggaaacccccacttcttccaagggacagcgatcccgggacggtcgaggcgtcggggcggtcaccgagacctctgcgggaagaccccgtcggggagagggcgcgcagccccgaagcgtctcgggaagtcgagcggaatcgggcgggatcacccgggggcgcagagcccccgtcgcgcctcgtgcggcagcggagagcccaggagaacgagccctcgggggccgaagcccatgcccgggttgggggcggctgcccagtgagtcctcctggccggccgggcggagaagagcgacaccgaagccggcgggaggggagcacttcaaggccggcggctgcggaggatgggcgcctgagcggctccgagcgcagcgcggcagaggaaggcgaggcgagctttggtgaggaggcgccaagggatcccgaagtgcagtctgcccccgggaagatggctcggcctgggcagcgttggctcggcaagtggcttgtggcgatggtcgtgtgggcgctgtgccggctcgccacaccgctggccaagaacctggagcccgtatcctggagctccctcaaccccaagttcctgagtgggaagggcttggtgatctatccgaaaattggagacaagctggacatcatctgcccccgagcagaagcagggcggccctatgagtactacaagctgtacctggtgcggcctgagcaggcagctgcctgtagcacagttctcgaccccaacgtgttggtcacctgcaataggccagagcaggaaatacgctttaccatcaagttccaggagttcagccccaactacatgggcctggagttcaagaagcaccatgattactacattacctcaacatccaatggaagcctggaggggctggaaaaccgggagggcggtgtgtgccgcacacgcaccatgaagatcatcatgaaggttgggcaagatcccaatgctgtgacgcctgagcagctgactaccagcaggcccagcaaggaggcagacaacactgtcaagatggccacacaggcccctggtagtcggggctccctgggtgactctgatggcaagcatgagactgtgaaccaggaagagaagagtggcccaggtgcaagtgggggcagcagcggggaccctgatggcttcttcaactccaaggtggcattgttcgcggctgtcggtgccggttgcgtcatcttcctgctcatcatcatcttcctgacggtcctactactgaagctacgcaagcggcaccgcaagcacacacagcagcgggcggctgccctctcgctcagtaccctggccagtcccaaggggggcagtggcacagcgggcaccgagcccagcgacatcatcattcccttacggactacagagaacaactactgcccccactatgagaaggtgagtggggactacgggcaccctgtctacatcgtccaagagatgccgccccagagcccggcgaacatctactacaaggtctgagtgcccggcacggcctcaggcccccgagggacagtcggcctggaccggacctctcctttcgcccccacaccccctccccttgccagctgtgcccacctttgtatttagttttgtagtttcttggcttttataatccccctttttccctgccccctgggcttcggaggggggtgcttgtgcccctaacccccatgctcttgtgccttccccctctggccaggcctctgggctccgtgggggcgccccttcttggaaggcagggctggacactgatggacagcaggcagggagacagtcccctggccctgcccctccctcgccccccttgccaccttcccaggactgcttgtccgctatcatcactgtttttaatgcttttgtgttcattttttagctgtcaactcattttcatctgttttttgaagaaaaatggaaaaatgtaaaaggcagcccctccccaggctttgtgagcctggcccaagccagtacaagagggcctggggcacgatgtggtcagccaggaagcataggatgccatttcttttatagattccttggtatttctggtggggtaaggggcaggccagggctgttcacgcccatgagggaagaggaaagtgccactgggcaaggtgtcccaccctcccctcctgaccctcctacgaggcttatcctggcaatggggtagtcactgccacccttccacacacacacacacacacacacacacaaaaaaaaatcccttccttgtgggattcttgggcatctcctgcctccctcactctcacggtaattaatgtcttaattggctgttgcctggggaacaggagagctgctgcaggcagatgacctcatggggggtggagggaggtgaggtgcccaggtggctatttgccctgcagagctgggagtttcacccccaccccccaccctgttctctccttacctttggcatcctttggcctggtggggaaacagaggcccagggtggagacctaagcgggtataagaccaggtggcctgctccttttctgggccctagcacaggtgggtaacccccacccaacccagctcctgctgctgtcccagtcttgggctggggcctggaaagaggaagaggctgcctggggctgggccagcccgctgtgcactttgaccccagttccttgccagcacggctgctaacagactgccacttgagtgcgccttgcaggcactcccagagcagccatggaaggagctggccctcacaccatccacctccacactgcctcctggccagctgcccaccccagtgccaggtgggagagggagcagaacagccagccccttccaggtggcagtcggaagggtttttgtttttgtttctgttgccatttgtgtaaatactagtctttttggaaaaaaaataatgtaaagatgttttgtataaactctgaattattttcttgttgcttttttcttagaaaaaaatgagaactaaaaaaaaaaaattaaccacatggagaaatggg

SEQ ID NO: 10564 - protein, 346 aa, Homo sapiens; identical to SEQ ID NO: 1339

SEQ ID NO: 10565 - DNA, 1958 bp, Homo sapiens
gtctatgcgagctggacagcagtgggaggtttgtgaggctcgcactggccgcagaccctcgggctcgatcgcccgggagccaggactcggcgacgcgaggctgccgggctacccggccgaggcttcgggggcgcaaactaatgggactggctcgctcggcagcatctccccgctcttctaagtacactgagcagggcccgcgctgaagtagaagctgtccgggggcgcgtagcccggagtcccagtgtggcccggaggaacggagcccgtgccagggcggcccagtcgggagcccggggaccgagcttgtgctgtggggaaacccccacttcttccaagggacagcgatcccgggacggtcgaggcgtcggggcggtcaccgagacctctgcgggaagaccccgtcggggagagggcgcgcagccccgaagcgtctcgggaagtcgagcggaatcgggcgggatcacccgggggcgcagagcccccgtcgcgcctcgtgcggcagcggagagcccccgagggacagtcggcctggaccggacctctcctttcgcccccacaccccctccccttgccagctgtgcccacctttgtatttagttttgtagtttcttggcttttataatccccctttttccctgccccctgggcttcggaggggggtgcttgtgcccctaacccccatgctcttgtgccttccccctctggccaggcctctgggctccgtgggggcgccccttcttggaaggcagggctggacactgatggacagcaggcagggagacagtcccctggccctgcccctccctcgccccccttgccaccttcccaggactgcttgtccgctatcatcactgtttttaatgcttttgtgttcattttttagctgtcaactcattttcatctgttttttgaagaaaaatggaaaaatgtaaaaggcagcccctccccaggctttgtgagcctggcccaagccagtacaagagggcctggggcacgatgtggtcagccaggaagcataggatgccatttcttttatagattccttggtatttctggtggggtaaggggcaggccagggctgttcacgcccatgagggaagaggaaagtgccactgggcaaggtgtcccaccctcccctcctgaccctcctacgaggcttatcctggcaatggggtagtcactgccacccttccacacacacacacacacacacacacacaaaaaaaaatcccttccttgtgggattcttgggcatctcctgcctccctcactctcacggtaattaatgtcttaattggctgttgcctggggaacaggagagctgctgcaggcagatgacctcatggggggtggagggaggtgaggtgcccaggtggctatttgccctgcagagctgggagtttcacccccaccccccaccctgttctctccttacctttggcatcctttggcctggtggggaaacagaggcccagggtggagacctaagcgggtataagaccaggtggcctgctccttttctgggccctagcacaggtgggtaacccccacccaacccagctcctgctgctgtcccagtcttgggctggggcctggaaagaggaagaggctgcctggggctgggccagcccgctgtgcactttgaccccagttccttgccagcacggctgctaacagactgccacttgagtgcgccttgcaggcactcccagagcagccatggaaggagctggccctcacaccatccacctccacactgcctcctggccagctgcccaccccagtgccaggtgggagagggagcagaacagccagccccttccaggtggcagtcggaagggtttttgtttttgtttctgttgccatttgtgtaaatactagtctttttggaaaaaaaataatgtaaagatgttttgtataaactctgaattattttcttgttgcttttttcttag

SEQ ID NO: 10566 - protein, 83 aa, Homo sapiens
MLLCLPPLARPLGSVGAPLLGRQGWTLMDSRQGDSPLALPLPRPPCHLPRTACPLSSLFLMLLCSFFSCQLIFICFLKKNGKM

SEQ ID NO: 10567 - DNA, 2006 bp, Homo sapiens
gtctatgcgagctggacagcagtgggaggtttgtgaggctcgcactggccgcagaccctcgggctcgatcgcccgggagccaggactcggcgacgcgaggctgccgggctacccggccgaggcttcgggggcgcaaactaatgggactggctcgctcggcagcatctccccgctcttctaagtacactgagcagggcccgcgctgaagtagaagctgtccgggggcgcgtagcccggagtcccagtgtggcccggaggaacggagcccgtgccagggcggcccagtcgggagcccggggaccgagcttgtgctgtggggaaacccccacttcttccaagggacagcgatcccgggacggtcgaggcgtcggggcggtcaccgagacctctgcgggaagaccccgtcggggagagggcgcgcagccccgaagcgtctcgggaagtcgagcggaatcgggcgggatcacccgggggcgcagagcccccgtcgcgcctcgtgcggcagcggagagcccccgagggacagtcggcctggaccggacctctcctttcgcccccacaccccctccccttgccagctgtgcccacctttgtatttagttttgtagtttcttggcttttataatccccctttttccctgccccctgggcttcggaggggggtgcttgtgcccctaacccccatgctcttgtgccttccccctctggccaggcctctgggctccgtgggggcgccccttcttggaaggcagggctggacactgatggacagcaggcagggagacagtcccctggccctgcccctccctcgccccccttgccaccttcccaggactgcttgtccgctatcatcactgtttttaatgcttttgtgttcattttttagctgtcaactcattttcatctgttttttgaagaaaaatggaaaaatgtaaaaggcagcccctccccaggctttgtgagcctggcccaagccagtacaagagggcctggggcacgatgtggtcagccaggaagcataggatgccatttcttttatagattccttggtatttctggtggggtaaggggcaggccagggctgttcacgcccatgagggaagaggaaagtgccactgggcaaggtgtcccaccctcccctcctgaccctcctacgaggcttatcctggcaatggggtagtcactgccacccttccacacacacacacacacacacacacacaaaaaaaaatcccttccttgtgggattcttgggcatctcctgcctccctcactctcacggtaattaatgtcttaattggctgttgcctggggaacaggagagctgctgcaggcagatgacctcatggggggtggagggaggtgaggtgcccaggtggctatttgccctgcagagctgggagtttcacccccaccccccaccctgttctctccttacctttggcatcctttggcctggtggggaaacagaggcccagggtggagacctaagcgggtataagaccaggtggcctgctccttttctgggccctagcacaggtgggtaacccccacccaacccagctcctgctgctgtcccagtcttgggctggggcctggaaagaggaagaggctgcctggggctgggccagcccgctgtgcactttgaccccagttccttgccagcacggctgctaacagactgccacttgagtgcgccttgcaggcactcccagagcagccatggaaggagctggccctcacaccatccacctccacactgcctcctggccagctgcccaccccagtgccaggtgggagagggagcagaacagccagccccttccaggtggcagtcggaagggtttttgtttttgtttctgttgccatttgtgtaaatactagtctttttggaaaaaaaataatgtaaagatgttttgtataaactctgaattattttcttgttgcttttttcttagaaaaaaatgagaactaaaaaaaaaaaattaaccacatggagaaatggg

SEQ ID NO: 10568 - protein, 83 aa, Homo sapiens; identical to SEQ ID NO: 10566

SEQ ID NO: 10569 - DNA, 1776 bp, Homo sapiens
atgcgagctggacagcagtgggaggtttgtgaggctcgcactggccgcagaccctcgggctcgatcgcccgggagccaggactcggcgacgcgaggctgccgggctacccggccgaggcttcgggggcgcaaactaatgggactggctcgagcgggcaccgagcccagcgacatcatcattcccttacggactacagagaacaactactgcccccactatgagaaggtgagtggggactacgggcaccctgtctacatcgtccaagagatgccgccccagagcccggcgaacatctactacaaggtctgagtgcccggcacggcctcaggcccccgagggacagtcggcctggaccggacctctcctttcgcccccacaccccctccccttgccagctgtgcccacctttgtatttagttttgtagtttcttggcttttataatccccctttttccctgccccctgggcttcggaggggggtgcttgtgcccctaacccccatgctcttgtgccttccccctctggccaggcctctgggctccgtgggggcgccccttcttggaaggcagggctggacactgatggacagcaggcagggagacagtcccctggccctgcccctccctcgccccccttgccaccttcccaggactgcttgtccgctatcatcactgtttttaatgcttttgtgttcattttttagctgtcaactcattttcatctgttttttgaagaaaaatggaaaaatgtaaaaggcagcccctccccaggctttgtgagcctggcccaagccagtacaagagggcctggggcacgatgtggtcagccaggaagcataggatgccatttcttttatagattccttggtatttctggtggggtaaggggcaggccagggctgttcacgcccatgagggaagaggaaagtgccactgggcaaggtgtcccaccctcccctcctgaccctcctacgaggcttatcctggcaatggggtagtcactgccacccttccacacacacacacacacacacacacacaaaaaaaaatcccttccttgtgggattcttgggcatctcctgcctccctcactctcacggtaattaatgtcttaattggctgttgcctggggaacaggagagctgctgcaggcagatgacctcatggggggtggagggaggtgaggtgcccaggtggctatttgccctgcagagctgggagtttcacccccaccccccaccctgttctctccttacctttggcatcctttggcctggtggggaaacagaggcccagggtggagacctaagcgggtataagaccaggtggcctgctccttttctgggccctagcacaggtgggtaacccccacccaacccagctcctgctgctgtcccagtcttgggctggggcctggaaagaggaagaggctgcctggggctgggccagcccgctgtgcactttgaccccagttccttgccagcacggctgctaacagactgccacttgagtgcgccttgcaggcactcccagagcagccatggaaggagctggccctcacaccatccacctccacactgcctcctggccagctgcccaccccagtgccaggtgggagagggagcagaacagccagccccttccaggtggcagtcggaagggtttttgtttttgtttctgttgccatttgtgtaaatactagtctttttggaaaaaaaataatgtaaagatgttttgtataaactctgaattattttcttgttgcttttttcttag

SEQ ID NO: 10570 - protein, 73 aa, Homo sapiens
MRAGQQWEVCEARTGRRPSGSIAREPGLGDARLPGYPAEASGAQTNGTGSSGHRAQRHHHSLTDYREQLLPPL

SEQ ID NO: 10571 - DNA, 1656 bp, Homo sapiens
atgcgagctggacagcagtgggaggtttgtgaggctcgcactggccgcagaccctcgggctcgatcgcccgggagccaggactcggcgacgcgaggctgccgggctacccggccgaggtacgggcaccctgtctacatcgtccaagagatgccgccccagagcccggcgaacatctactacaaggtctgagtgcccggcacggcctcaggcccccgagggacagtcggcctggaccggacctctcctttcgcccccacaccccctccccttgccagctgtgcccacctttgtatttagttttgtagtttcttggcttttataatccccctttttccctgccccctgggcttcggaggggggtgcttgtgcccctaacccccatgctcttgtgccttccccctctggccaggcctctgggctccgtgggggcgccccttcttggaaggcagggctggacactgatggacagcaggcagggagacagtcccctggccctgcccctccctcgccccccttgccaccttcccaggactgcttgtccgctatcatcactgtttttaatgcttttgtgttcattttttagctgtcaactcattttcatctgttttttgaagaaaaatggaaaaatgtaaaaggcagcccctccccaggctttgtgagcctggcccaagccagtacaagagggcctggggcacgatgtggtcagccaggaagcataggatgccatttcttttatagattccttggtatttctggtggggtaaggggcaggccagggctgttcacgcccatgagggaagaggaaagtgccactgggcaaggtgtcccaccctcccctcctgaccctcctacgaggcttatcctggcaatggggtagtcactgccacccttccacacacacacacacacacacacacacaaaaaaaaatcccttccttgtgggattcttgggcatctcctgcctccctcactctcacggtaattaatgtcttaattggctgttgcctggggaacaggagagctgctgcaggcagatgacctcatggggggtggagggaggtgaggtgcccaggtggctatttgccctgcagagctgggagtttcacccccaccccccaccctgttctctccttacctttggcatcctttggcctggtggggaaacagaggcccagggtggagacctaagcgggtataagaccaggtggcctgctccttttctgggccctagcacaggtgggtaacccccacccaacccagctcctgctgctgtcccagtcttgggctggggcctggaaagaggaagaggctgcctggggctgggccagcccgctgtgcactttgaccccagttccttgccagcacggctgctaacagactgccacttgagtgcgccttgcaggcactcccagagcagccatggaaggagctggccctcacaccatccacctccacactgcctcctggccagctgcccaccccagtgccaggtgggagagggagcagaacagccagccccttccaggtggcagtcggaagggtttttgtttttgtttctgttgccatttgtgtaaatactagtctttttggaaaaaaaataatgtaaagatgttttgtataaactctgaattattttcttgttgcttttttcttag

SEQ ID NO: 10572 - protein, 101 aa, Homo sapiens [sequence omitted]

SEQ ID NO: 10573 - DNA, 1704 bp, Homo sapiens
atgcgagctggacagcagtgggaggtttgtgaggctcgcactggccgcagaccctcgggctcgatcgcccgggagccaggactcggcgacgcgaggctgccgggctacccggccgaggtacgggcaccctgtctacatcgtccaagagatgccgccccagagcccggcgaacatctactacaaggtctgagtgcccggcacggcctcaggcccccgagggacagtcggcctggaccggacctctcctttcgcccccacaccccctccccttgccagctgtgcccacctttgtatttagttttgtagtttcttggcttttataatccccctttttccctgccccctgggcttcggaggggggtgcttgtgcccctaacccccatgctcttgtgccttccccctctggccaggcctctgggctccgtgggggcgccccttcttggaaggcagggctggacactgatggacagcaggcagggagacagtcccctggccctgcccctccctcgccccccttgccaccttcccaggactgcttgtccgctatcatcactgtttttaatgcttttgtgttcattttttagctgtcaactcattttcatctgttttttgaagaaaaatggaaaaatgtaaaaggcagcccctccccaggctttgtgagcctggcccaagccagtacaagagggcctggggcacgatgtggtcagccaggaagcataggatgccatttcttttatagattccttggtatttctggtggggtaaggggcaggccagggctgttcacgcccatgagggaagaggaaagtgccactgggcaaggtgtcccaccctcccctcctgaccctcctacgaggcttatcctggcaatggggtagtcactgccacccttccacacacacacacacacacacacacacaaaaaaaaatcccttccttgtgggattcttgggcatctcctgcctccctcactctcacggtaattaatgtcttaattggctgttgcctggggaacaggagagctgctgcaggcagatgacctcatggggggtggagggaggtgaggtgcccaggtggctatttgccctgcagagctgggagtttcacccccaccccccaccctgttctctccttacctttggcatcctttggcctggtggggaaacagaggcccagggtggagacctaagcgggtataagaccaggtggcctgctccttttctgggccctagcacaggtgggtaacccccacccaacccagctcctgctgctgtcccagtcttgggctggggcctggaaagaggaagaggctgcctggggctgggccagcccgctgtgcactttgaccccagttccttgccagcacggctgctaacagactgccacttgagtgcgccttgcaggcactcccagagcagccatggaaggagctggccctcacaccatccacctccacactgcctcctggccagctgcccaccccagtgccaggtgggagagggagcagaacagccagccccttccaggtggcagtcggaagggtttttgtttttgtttctgttgccatttgtgtaaatactagtctttttggaaaaaaaataatgtaaagatgttttgtataaactctgaattattttcttgttgcttttttcttagaaaaaaatgagaactaaaaaaaaaaaattaaccacatggagaaatggg

SEQ ID NO: 10574 - protein, 101 aa, Homo sapiens [sequence omitted]

SEQ ID NO: 10575 - DNA, 1824 bp, Homo sapiens
atgcgagctggacagcagtgggaggtttgtgaggctcgcactggccgcagaccctcgggctcgatcgcccgggagccaggactcggcgacgcgaggctgccgggctacccggccgaggcttcgggggcgcaaactaatgggactggctcgagcgggcaccgagcccagcgacatcatcattcccttacggactacagagaacaactactgcccccactatgagaaggtgagtggggactacgggcaccctgtctacatcgtccaagagatgccgccccagagcccggcgaacatctactacaaggtctgagtgcccggcacggcctcaggcccccgagggacagtcggcctggaccggacctctcctttcgcccccacaccccctccccttgccagctgtgcccacctttgtatttagttttgtagtttcttggcttttataatccccctttttccctgccccctgggcttcggaggggggtgcttgtgcccctaacccccatgctcttgtgccttccccctctggccaggcctctgggctccgtgggggcgccccttcttggaaggcagggctggacactgatggacagcaggcagggagacagtcccctggccctgcccctccctcgccccccttgccaccttcccaggactgcttgtccgctatcatcactgtttttaatgcttttgtgttcattttttagctgtcaactcattttcatctgttttttgaagaaaaatggaaaaatgtaaaaggcagcccctccccaggctttgtgagcctggcccaagccagtacaagagggcctggggcacgatgtggtcagccaggaagcataggatgccatttcttttatagattccttggtatttctggtggggtaaggggcaggccagggctgttcacgcccatgagggaagaggaaagtgccactgggcaaggtgtcccaccctcccctcctgaccctcctacgaggcttatcctggcaatggggtagtcactgccacccttccacacacacacacacacacacacacacaaaaaaaaatcccttccttgtgggattcttgggcatctcctgcctccctcactctcacggtaattaatgtcttaattggctgttgcctggggaacaggagagctgctgcaggcagatgacctcatggggggtggagggaggtgaggtgcccaggtggctatttgccctgcagagctgggagtttcacccccaccccccaccctgttctctccttacctttggcatcctttggcctggtggggaaacagaggcccagggtggagacctaagcgggtataagaccaggtggcctgctccttttctgggccctagcacaggtgggtaacccccacccaacccagctcctgctgctgtcccagtcttgggctggggcctggaaagaggaagaggctgcctggggctgggccagcccgctgtgcactttgaccccagttccttgccagcacggctgctaacagactgccacttgagtgcgccttgcaggcactcccagagcagccatggaaggagctggccctcacaccatccacctccacactgcctcctggccagctgcccaccccagtgccaggtgggagagggagcagaacagccagccccttccaggtggcagtcggaagggtttttgtttttgtttctgttgccatttgtgtaaatactagtctttttggaaaaaaaataatgtaaagatgttttgtataaactctgaattattttcttgttgcttttttcttagaaaaaaatgagaactaaaaaaaaaaaattaaccacatggagaaatggg

SEQ ID NO: 10576 - protein, 73 aa, Homo sapiens; identical to SEQ ID NO: 10570

SEQ ID NO: 10577 - DNA, 1443 bp, Homo sapiens
cggggaccctgatggcttcttcaactccaaggtggcattgttcgcggctgtcggtgccggttgcgtcatcttcctgctcatcatcatcttcctgacggtcctactactgaagctacgcaagcggcaccgcaagcacacacagcagcgggcggctgccctctcgctcagtaccctggccagtcccaaggggggcagtggcacagcgggcaccgagcccagcgacatcatcattcccttacggactacagagaacaactactgcccccactatgagaaggtgagtggggactacgggcaccctgtctacatcgtccaagagatgccgccccagagcccggcgaacatctactacaaggtctgagtgcccggcacggcctcaggcccccgagggacagtcggcctggaccggacctctcctttcgcccccacaccccctccccttgccagctgtgcccacctttgtatttagttttgtagtttcttggcttttataatccccctttttccctgccccctgggcttcggaggggggtgcttgtgcccctaacccccatgctcttgtgccttccccctctggccaggcctctgggctccgtgggggcgccccttcttggaaggcagggctggacactgatggacagcaggcagggagacagtcccctggccctgcccctccctcgccccccttgccaccttcccaggactgcttgtccgctatcatcactgtttttaatgcttttgtgttcattttttagctgtcaactcattttcatctgttttttgaagaaaaatggaaaaatgtaaaaggcagcccctccccaggctttgtgagcctggcccaagccagtacaagagggcctggggcacgatgtggtcagccaggaagcataggatgccatttcttttatagattccttggtatttctggtggggtaaggggcaggccagggctgttcacgcccatgagggaagaggaaagtgccactgggcaaggtgtcccaccctcccctcctgaccctcctacgaggcttatcctggcaatggggtagtcactgccacccttccacacacacacacacacacacacacacaaaaaaaaatcccttccttgtgggattcttgggcatctcctgcctccctcactctcacgcacggctgctaacagactgccacttgagtgcgccttgcaggcactcccagagcagccatggaaggagctggccctcacaccatccacctccacactgcctcctggccagctgcccaccccagtgccaggtgggagagggagcagaacagccagccccttccaggtggcagtcggaagggtttttgtttttgtttctgttgccatttgtgtaaatactagtctttttggaaaaaaaataatgtaaagatgttttgtataaactctgaattattttcttgttgcttttttcttag

SEQ ID NO: 10578 - protein, 83 aa, Homo sapiens; identical to SEQ ID NO: 10566

SEQ ID NO: 10579 - DNA, 687 bp, Homo sapiens
ttgttcgcggctgtcggtgccggttgcgtcatcttcctgctcatcatcatcttcctgacggtcctactactgaagctacgcaagcggcaccgcaagcacacacagcagcgggcggctgccctctcgctcagtaccctggccagtcccaaggggggcagtggcacagcgggcaccgagcccagcgacatcatcattcctccttttctgggccctagcacaggtgggtaacccccacccaacccagctcctgctgctgtcccagtcttgggctggggcctggaaagaggaagaggctgcctggggctgggccagcccgctgtgcactttgaccccagttccttgccagcacggctgctaacagactgccacttgagtgcgccttgcaggcactcccagagcagccatggaaggagctggccctcacaccatccacctccacactgcctcctggccagctgcccaccccagtgccaggtgggagagggagcagaacagccagccccttccaggtggcagtcggaagggtttttgtttttgtttctgttgccatttgtgtaaatactagtctttttggaaaaaaaataatgtaaagatgttttgtataaactctgaattattttcttgttgcttttttcttagaaaaaaatgagaactaaaaaaaaaaaattaaccacatggagaaatggg

SEQ ID NO: 10580 - protein, 53 aa, Homo sapiens
MEGAGPHTIHLHTASWPAAHPSARWEREQNSQPLPGGSRKGFCFCFCCHLCKY

SEQ ID NO: 10581 - DNA, 1069 bp, Homo sapiens
gcagcgggcggctgccctctcgctcagtaccctggccagtcccaaggggggcagtggcacagcgggcaccgagcccagcgacatcatcattcccttacggactacagagaacaactactgcccccactatgagaaggtgagtggggactacgggcaccctgtctacatcgtccaagagatgccgccccagagcccggcgaacatctactacaaggtctgagtgcccggcacggcctcaggcccccgagggacagtcggcctggaccggacctctcctttcgcccccacaccccctccccttgccagctgtgcccacctttgtatttagttttgtagtttcttggcttttataatccccctttttccctgccccctgggcttcggaggggggtgcttgtgcccctaacccccatgctcttgtgccttccccctctggccaggcctctgggctccgtgggggcgccccttcttggaaggcagggctggacactgatggacagcaggcagggagacagtcccctggccctgcccctccctcgccccccttgccaccttcccaggactgcttgtccgctatcatcactgtttttaatgcttttgtgttcattttttagctgtcaactcattttcatctgttttttgaagaaaaatggaaaaatgtaaaaggcagcccctccccaggctttgtgagcctggcccaagccagtacaagagggcctggggcacgatgtggtcagccaggaagcataggatgccatttcttttatagattccttggtatttctggtggggtaaggggcaggccagggctgttcacgcccatgagggaagaggaaagtgccactgggcaaggtgtcccacccatccacctccacactgcctcctggccagctgcccaccccagtgccaggtgggagagggagcagaacagccagccccttccaggtggcagtcggaagggtttttgtttttgtttctgttgccatttgtgtaaatactagtctttttggaaaaaaaataatgtaaagatgttttgtataaactctgaattattttcttgttgcttttt

SEQ ID NO: 10582 - protein, 59 aa, Homo sapiens
MREEESATGQGVPPIHLHTASWPAAHPSARWEREQNSQPLPGGSRKGFCFCFCCHLCKY

SEQ ID NO: 10583 - DNA, 1192 bp, Homo sapiens
ctctgggctccgtgggggcgccccttcttggaaggcagggctggacactgatggacagcaggcagggagacagtcccctggccctgcccctccctcgccccccttgccaccttcccaggactgcttgtccgctatcatcactgtttttaatgcttttgtgttcattttttagctgtcaactcattttcatctgttttttgaagaaaaatggaaaaatgtaaaaggcagcccctccccaggctttgtgagcctggcccaagccagtacaagagggcctggggcacgatgtggtcagccaggaagcataggatgccatttcttttatagattccttggtatttctggtggggtaaggggcaggccagggctgttcacgcccatgagggaagaggaaagtgccactgggcaaggtgtcccaccctcccctcctgaccctcctacgaggcttatcctggcaatggggtagtcactgccacccttccacacacacacacacacacacacacacaaaaaaaaatcccttccttgtgggattcttgggcatctcctgcctccctcactctcacggtaattaatgtcttaattggctgttgcctggggaacaggagagctgctgcaggcagatgacctcatggggggtggagggaggtgaggtgcccaggtggctatttgccctgcagagctgggagtttcacccccaccccccaccctgttctctccttacctttggcatcctttggcctggtggggaaacagaggcccagggtggagacctaagcgggtataagaccaggtggcctgctccttttctgggccctagcacaggtgggtaacccccacccaacccagctcctgctgctgtcccagtcttgggctggggcctggaaagaggaagaggctgcctggggctgggccagcccgctgtgcactttgaccccagttccttgccagcacggctgctaacagactgccacttgagtgcgccttgcaggcactcccagaaacagccagccccttccaggtggcagtcggaagggtttttgtttttgtttctgttgccatttgtgtaaatactagtctttttggaaaaaaaataatgtaaagatgttttgtataaactctgaattattttcttgttgcttttttcttagaaaaaaatgagaactaaaaaaaaaaaattaaccacatggag

SEQ ID NO: 10584 - protein, 69 aa, Homo sapiens [sequence omitted]

SEQ ID NO: 10585 - DNA, 2201 bp, Homo sapiens
gaaaaatgttagaaaccaggaagacaactctacttttttgcattgggggaataaacaaaccaactaaccaactaaaataatacacttactccaactaagacaacataggaagaccagagagatgattggagtcaccaagttgaagtacattagtttgggatgataattccttatgacagtgtttatccaaatctgtcatggaaatactacatcttgacatgcccttagacttctgtctgaacattgctaaactgctgatggatcatgaaagagaatctgttgggtttcatttcctgacgattattcatgaacgttttaagtcatcggaaaatattggaaaagttctgatactccatactgacatgcttttacaaaggaaggaagaacttcttgccaaggagaagattgaagaaatctttttagctcaccaaacaggaagacaactgacagcagaatcaatgaactggttacacaacattctgtggagacaagctgccagtagttttgaggtacaaaattacactgatgccctacaatggtactattattctctgaggttttattcaactgatgaaatggatctggacttcaccaagctgcagaggaacatggcttgctgttacctgaatttgcaacaacttgataaggccaaagaggcagtggcagaagctgaacgacatgaccctaggaacgttttcactcaattttatatattcaagattgcagtcatagagggcaactctgaaagagctttgcaggcaataattactttagagaatatattaacagatgaagagtcagaagataatgatctagttgcagagagaggttcacctaccatgcttctaagtttagctgcccagtttgctctagagaatggacaacaaattgtggcagaaaaagctttggaatatttagctcaacattcagaagaccaggaacaagttcttacagctgtaaagtgtttgcttcgttttcttcttccaaaaattgctgaaatgccggaatctgaagataagaagaaagaaatggatcgacttttgacttgcctgaatagagcctttgtgaaactttctcagccttttggtgaagaagccttaagtttggagtcaagagctaatgaagctcagtggtttcgaaaaacagcttggaacttggctgtgcaatgtgacaaagatccagtgatgatgagagagttttttatactttcttataagatgtcccagttttgtccttctgatcaagtaattctgattgcacggaaaacatgtttacttatggcagttgcagttgatctagagcaagggagaaaagcttcaacagcttttgaacagaccatgttcctgagtcgtgcacttgaggagatccagacatgcaatgacatccataatttcctgaaacaaacagggaccttctcaaatgattcatgtgagaaattgcttctgctgtacgagtttgaagttagagccaaattgaatgatccattactggaaagcttcctggaatcagtgtgggagttgcctcatttagaaactaaaacttttgaaacaattgcaataatagcaatggaaaagcctgcacactatcctttgattgctctcaaggccttgaaaaaggctttattgctctacaaaaaggaagaaccaattgatatatcacaatacagcaaatgtatgcacaacttggttaacctctcagtgccagatggggcgtcgaatgtagagctctgtcccctggaagaagtttggggctattttgaagatgctctgagccacattagccgcactaaagactacccagaaatggagattctctggctgatggtcaagtcctggaataccggagtacttatgtttagcaggagcaagtatgcatctgctgaaaagtggtgtggcctggccttgcgtttccttaaccaccttacctccttcaaggaaagctatgaaactcagatgaatatgctgtatagtcagcttgtggaagcattgagtaacaacaagggcccagtttttcatgaacatggctactggagcaagtcagattaggcaagctcatggccacatgaagaagatacattgtcccgagatgctgactgtttaaatttttgccagagtttctcttgagcttttgtttctgtttgctcagaccctgttttcatgttgttgaataaactttctaaaataaaagcatgctgaatttac

SEQ ID NO: 10586 - protein, 615 aa, Homo sapiens
MEILHLDMPLDFCLNIAKLLMDHERESVGFHFLTIIHERFKSSENIGKVLILHTDMLLQRKEELLAKEKIEEIFLAHQTGRQLTAESMNWLHNILWRQAASSFEVQNYTDALQWYYYSLRFYSTDEMDLDFTKLQRNMACCYLNLQQLDKAKEAVAEAERHDPRNVFTQFYIFKIAVIEGNSERALQAIITLENILTDEESEDNDLVAERGSPTMLLSLAAQFALENGQQIVAEKALEYLAQHSEDQEQVLTAVKCLLRFLLPKIAEMPESEDKKKEMDRLLTCLNRAFVKLSQPFGEEALSLESRANEAQWFRKTAWNLAVQCDKDPVMMREFFILSYKMSQFCPSDQVILIARKTCLLMAVAVDLEQGRKASTAFEQTMFLSRALEEIQTCNDIHNFLKQTGTFSNDSCEKLLLLYEFEVRAKLNDPLLESFLESVWELPHLETKTFETIAIIAMEKPAHYPLIALKALKKALLLYKKEEPIDISQYSKCMHNLVNLSVPDGASNVELCPLEEVWGYFEDALSHISRTKDYPEMEILWLMVKSWNTGVLMFSRSKYASAEKWCGLALRFLNHLTSFKESYETQMNMLYSQLVEALSNNKGPVFHEHGYWSKSD

SEQ ID NO: 10587 - DNA, 3141 bp, Homo sapiens
gtcctcgtgcgctgtggacggaggttgtggagagagcagggcggcattggtggctgcggctgaggcttgagccagagatttaaaaatggacaatgatgattttttttccatggactttaaagatggagtctgtctctgttgtccaggctggagtgcagtggcatgatctcggctcactgcaacctccgcctcctgtgttcaagcgattcttctgcctcagcctcccaagtagctgggactacagaagttgttgaaaacctggttacaaatgataattcacctaacataccagaggcaattgatagactcttcagcgacatagcaaatatcaacagggagtctatggctgaaataacagacattcagattgaagaaatggcagtaaacctatggaactgggcacttaccataggaggaggttggcttgtaaatgaagagcagaaaattagattacattatgttgcttgcaagttgctgagtatgtgtgaagcctcatttgcctcagaacaaagtattcaacgactgattatgatgaatatgagaataggaaaagaatggttggatgctggaaattttctaatcgctgatgaatgttttcaagctgctgtggccagtctggagcaattatacgtcaaattaattcaaaggagctcccctgaggctgacttgaccatggagaagattactgttgagagtgaccacttcagagtgctttcttaccaagcagagtcagcagttgctcaaggggattttcaaagagcatctatgtgtgtactgcaatgtaaagatatgttgatgaggctcccccagatgacttcaagtcttcatcatctctgttacaactttggagtagaaacccagaagaataataaatatgaagaaagttctttctggcttagccaaagctatgatattgggaagatggataagaaatctactgggccagaaatgctggctaaagttctacggctattagccacgaattatttggattgggatgacaccaaatattatgataaggctctcaatgctgtaaacctagcaaacaaggaacatttaagttctcctgggcttttcttaaaaatgaaaatcctcttgaaaggcgaaacatctaatgaagaactccttgaagctgtcatggaaatactacatcttgacatgcccttagacttctgtctgaacattgctaaactgctgatggatcatgaaagagaatctgttgggtttcatttcctgacgattattcatgaacgttttaagtcatcggaaaatattggaaaagttctgatactccatactgacatgcttttacaaaggaaggaagaacttcttgccaaggagaagattgaagaaatctttttagctcaccaaacaggaagacaactgacagcagaatcaatgaactggttacacaacattctgtggagacaagctgccagtagttttgaggtacaaaattacactgatgccctacaatggtactattattctctgaggttttattcaactgatgaaatggatctggacttcaccaagctgcagaggaacatggcttgctgttacctgaatttgcaacaacttgataaggccaaagaggcagtggcagaagctgaacgacatgaccctaggaacgttttcactcaattttatatattcaagattgcagtcatagagggcaactctgaaagagctttgcaggcaataattactttagagaatatattaacagatgaagagtcagaagataatgatctagttgcagagagaggttcacctaccatgcttctaagtttagctgcccagtttgctctagagaatggacaacaaattgtggcagaaaaagctttggaatatttagctcaacattcagaagaccaggaacaagttcttacagctgtaaagtgtttgcttcgttttcttcttccaaaaattgctgaaatgccggaatctgaagataagaagaaagaaatggatcgacttttgacttgcctgaatagagcctttgtgaaactttctcagccttttggtgaagaagccttaagtttggagtcaagagctaatgaagctcagtggtttcgaaaaacagcttggaacttggctgtgcaatgtgacaaagatccagtgatgatgagagagttttttatactttcttataagatgtcccagttttgtccttctgatcaagtaattctgattgcacggaaaacatgtttacttatggcagttgcagttgatctagagcaagggagaaaagcttcaacagcttttgaacagaccatgttcctgagtcgtgcacttgaggagatccagacatgcaatgacatccataatttcctgaaacaaacagggaccttctcaaatgattcatgtgagaaattgcttctgctgtacgagtttgaagttagagccaaattgaatgatccattactggaaagcttcctggaatcagtgtgggagttgcctcatttagaaactaaaacttttgaaacaattgcaataatagcaatggaaaagcctgcacactatcctttgattgctctcaaggccttgaaaaaggctttattgctctacaaaaaggaagaaccaattgatatatcacaatacagcaaatgtatgcacaacttggttaacctctcagtgccagatggggcgtcgaatgtagagctctgtcccctggaagaagtttggggctattttgaagatgctctgagccacattagccgcactaaagactacccagaaatggagattctctggctgatggtcaagtcctggaataccggagtacttatgtttagcaggagcaagtatgcatctgctgaaaagtggtgtggcctggccttgcgtttccttaaccaccttacctccttcaaggaaagctatgaaactcagatgaatatgctgtatagtcagcttgtggaagcattgagtaacaacaagggcccagtttttcatgaacatggctactggagcaagtcagattaggcaagctcatggccacatgaagaagatacattgtcccgagatgctgactgtttaaatttttgccagagtttctcttgagcttttgtttctgtttgctcagaccctgttttcatgttgttgaataaactttctaaaataaaagcatgctgaatttac

SEQ ID NO: 10588 - protein, 940 aa, Homo sapiens; identical to SEQ ID NO: 1341

SEQ ID NO: 10589 - DNA, 3033 bp, Homo sapiens
ggagttttctgaacgtcctcgtgcgctgtggacggaggttgtggagagagcagggcggcattggtggctgcggctgaggcttgagccagagatttaaaaatggacaatgatgattttttttccatggactttaaagaagttgttgaaaacctggttacaaatgataattcacctaacataccagaggcaattgatagactcttcagcgacatagcaaatatcaacagggagtctatggctgaaataacagacattcagattgaagaaatggcagtaaacctatggaactgggcacttaccataggaggaggttggcttgtaaatgaagagcagaaaattagattacattatgttgcttgcaagttgctgagtatgtgtgaagcctcatttgcctcagaacaaagtattcaacgactgattatgatgaatatgagaataggaaaagaatggttggatgctggaaattttctaatcgctgatgaatgttttcaagctgctgtggccagtctggagcaattatacgtcaaattaattcaaaggagctcccctgaggctgacttgaccatggagaagattactgttgagagtgaccacttcagagtgctttcttaccaagcagagtcagcagttgctcaaggggattttcaaagagcatctatgtgtgtactgcaatgtaaagatatgttgatgaggctcccccagatgacttcaagtcttcatcatctctgttacaactttggagtagaaacccagaagaataataaatatgaagaaagttctttctggcttagccaaagctatgatattgggaagatggataagaaatctactgggccagaaatgctggctaaagttctacggctattagccacgaattatttggattgggatgacaccaaatattatgataaggctctcaatgctgtaaacctagcaaacaaggaacatttaagttctcctgggcttttcttaaaaatgaaaatcctcttgaaaggcgaaacatctaatgaagaactccttgaagctgtcatggaaatactacatcttgacatgcccttagacttctgtctgaacattgctaaactgctgatggatcatgaaagagaatctgttgggtttcatttcctgacgattattcatgaacgttttaagtcatcggaaaatattggaaaagttctgatactccatactgacatgcttttacaaaggaaggaagaacttcttgccaaggagaagattgaagaaatctttttagctcaccaaacaggaagacaactgacagcagaatcaatgaactggttacacaacattctgtggagacaagctgccagtagttttgaggtacaaaattacactgatgccctacaatggtactattattctctgaggttttattcaactgatgaaatggatctggacttcaccaagctgcagaggaacatggcttgctgttacctgaatttgcaacaacttgataaggccaaagaggcagtggcagaagctgaacgacatgaccctaggaacgttttcactcaattttatatattcaagattgcagtcatagagggcaactctgaaagagctttgcaggcaataattactttagagaatatattaacagatgaagagtcagaagataatgatctagttgcagagagaggttcacctaccatgcttctaagtttagctgcccagtttgctctagagaatggacaacaaattgtggcagaaaaagctttggaatatttagctcaacattcagaagaccaggaacaagttcttacagctgtaaagtgtttgcttcgttttcttcttccaaaaattgctgaaatgccggaatctgaagataagaagaaagaaatggatcgacttttgacttgcctgaatagagcctttgtgaaactttctcagccttttggtgaagaagccttaagtttggagtcaagagctaatgaagctcagtggtttcgaaaaacagcttggaacttggctgtgcaatgtgacaaagatccagtgatgatgagagagttttttatactttcttataagatgtcccagttttgtccttctgatcaagtaattctgattgcacggaaaacatgtttacttatggcagttgcagttgatctagagcaagggagaaaagcttcaacagcttttgaacagaccatgttcctgagtcgtgcacttgaggagatccagacatgcaatgacatccataatttcctgaaacaaacagggaccttctcaaatgattcatgtgagaaattgcttctgctgtacgagtttgaagttagagccaaattgaatgatccattactggaaagcttcctggaatcagtgtgggagttgcctcatttagaaactaaaacttttgaaacaattgcaataatagcaatggaaaagcctgcacactatcctttgattgctctcaaggccttgaaaaaggctttattgctctacaaaaaggaagaaccaattgatatatcacaatacagcaaatgtatgcacaacttggttaacctctcagtgccagatggggcgtcgaatgtagagctctgtcccctggaagaagtttggggctattttgaagatgctctgagccacattagccgcactaaagactacccagaaatggagattctctggctgatggtcaagtcctggaataccggagtacttatgtttagcaggagcaagtatgcatctgctgaaaagtggtgtggcctggccttgcgtttccttaaccaccttacctccttcaaggaaagctatgaaactcagatgaatatgctgtatagtcagcttgtggaagcattgagtaacaacaagggcccagtttttcatgaacatggctactggagcaagtcagattaggcaagctcatggccacatgaagaagatacattgtcccgagatgctgactgtttaaatttttgccagagtttctcttgagcttttgtttctgtttgctcagaccctgttttcatgttgttgaataaactttctaaaataaaagcatgctgaatttac

SEQ ID NO: 10590 - protein, 925 aa, Homo sapiens; identical to SEQ ID NO: 1343

SEQ ID NO: 10591 - DNA, 752 bp, Homo sapiens
cacccagagaatctctctgcaccacgtattccagctggaggtggcgtcagcaattctggactgctttttctatcttttcagtgcctcattcagtgatgtcaagttaaaaccagaaacgatgggtgttcaccagatttttggttcttatgaagggacatggatggagctggaaacacttatgctcagcaaactaatgcaggaacagaaaaccaagaaccacatattctcacttataagtgggagctaaacaatgagaaaacatggacacatgtgggggaacaaaacataccggggcctgttgcagaagcaggcagggtgagggagagcatcgggaagaacagctaatggatgctgggcttaatacctaggtgatgggttgatctgtgcagcacatcaccgtggcacatgtttacctatgtcacaaacctgcacatcctgcacctgtacccctgaacttaaaagttgaagaagaaaaaataaatttgcatatagtaatttttaggatacactgttagggtcaatacatttcatacggttttaacgtatggctcatcttaccctacaaggaatattggaaaattgtctgggggcaaaagagcctgacctttgtgctgtcatgttgacaagtcttgtgaggaaagcggccctggaaaggcacgtgcctctgtgcaaattactttccagcagaggtaattcccatagaggctaatagttaaaggctttgtgccaagcctcactccacacagctagag

SEQ ID NO: 10592 - protein, 42 aa, Homo sapiens
MGVHQIFGSYEGTWMELETLMLSKLMQEQKTKNHIFSLISGS

SEQ ID NO: 10593 - DNA, 655 bp, Homo sapiens
aagaccggcaggcaggctgcaggcagcggataggacacagagacagacagacagacacacgcgcgggggatcgaagaccgcccagatacccaagatgcccactggatagagtgattaaccatccctgttaatgtggaacagagaggtttcctgggatactggactttcagtggtaaaagttggaaagtctaagctggctggcaaaatgtaataatgtgaaagaagaaaactctaggaagaaacttcaacagtaaaatgaaataaaatactaagaggattttcaggaaacgctgtttggaaggcagaagggagacgggacaaatagcaagattttaaagtgaagaggccggcccaatataggccctcgggagctggaaaggaaggccacctagtggcgtttgagcgaaggacacagcttatctgcagttaataaccggcagagaaagagcagaaggatataagaacatcaacttaatttcccaacttcactgtgatctgcctatcaacccacacccatggaacaatcctaatcagaagacacaaggggctccagggcctttggccacagactgaaggcggcactatcagcttccctacttttgaggttttgggactcagactgatccaccactggcttccttgctcctcaacttgc

SEQ ID NO: 10594 - protein, 59 aa, Homo sapiens
FPNFTVICLSTHTHGTILIRRHKGLQGLWPQTEGGTISFPTFEVLGLRLIHHWLPCSST

SEQ ID NO: 10595 - DNA, 1949 bp, Homo sapiens
agaggaagcgggaagttacttagcacggttccgggtttctcgcgccccgcctgtcccccctccctatcactgctactggctcttggtccctccgttggactgtcctgcggagagaaaccccagcccatcggtctgcgctgggaccgcccgccgcgcatctgcccttcttcgctgactccgccccgcatctggccagacccgcctcgcgtcagagctgacccactcactgcgcgtttgccagtcagtctctccggacctgcctcgagcctcaggctgctgaaatcaccgcgcctcactcgcctggccgctgccaatagagccatctggcacatgaatggagtgcggctcaacaaccgccaggtgtatgttggcagattcaaattcccagaagagcgggcggctgaggtcagaaccagggatagagcaactttcaccaatgttttcgttaaaaacattggagacgacatagatgacgaaaaactgaaggaacttttctgtgaatatgggccaactgagagtgttaaagtaataagagatgccagtgggaaatctaaaggctttggatttgtgagatatgagacacacgaggctgcccaaaaggctgtgctagacttgcatggaaagtccatcgatggaaaagtcctctatgtagggcgagcacagaagaaaattgaacgcctggctgagttgaggcggagatttgaacggctgaggttaaaagaaaaaagtcggcccccaggggtgcctatctatattaagaacttggatgagacaatcaatgatgaaaaactgaaggaggaattttcttcctttgggtcaattagtcgggccaaagtgatgatggaagtggggcaaggcaaaggatttggtgtggtctgcttttcctcttttgaagaggctaccaaagcagtggatgagatgaatggccgcatagtgggctccaagcccctgcatgtcaccctgggccaggccaggcgcaggtgctgagaataagaatgctcagtttgtttcagccttagttggtgcctccttagtttgggctcctttgtgataaggggttattttatgctaattcacaagtttttttttgaagtgaattcttttgaaaaaaaaatgcaaaactagaaaactttattcattttagaatagaacataatttctaactgtaaaattgtcattttgtactttttttgatgtaatatccttagaaatctgtagaataaagtgtattcctccacttttttttcctgaacagtcaaggtgaggcaattgattgagtatatttcccttcttatttcagtaatactctattttttttcatgaaaatgtcaacatggttcttctgaatctatcacagtgaaaagttctaacttgtttttgagaagtcagtacagcaggggaaaacatatgtgatgcaattaacatctgcataatttcacttaaaattattatgcaaaaatgaatgttttttcaaaaaatgtgaaatgtattttattttctttatttgtattcttgtttcattttttaatatgttgtgaacatgctacagatttgatagtacttttgactaaatgttgggagtggtcgtattaacttcttgcccaaagaagtaagcatattggtgttttctcaattagtcactgagaaaattaacactttaggcagtggctatttaaagtaggaattgcatcttaaaaacctttcctaagagatttggtatgtgaggatactttcagtaccactcctaccattcatttttctaaattccttagtacatatacttggatcatgttaaattaacaagaaagatgaataactgcgctgaattgcctttacctataaataatttaatattttaccttcgggttttatcaactgtcaatataaaaggcagtactccacagaatgatgttgaaaaacttcttcgaagaacaccttctattaaactt

SEQ ID NO: 10596 - protein, 218 aa, Homo sapiens
MNGVRLNNRQVYVGRFKFPEERAAEVRTRDRATFTNVFVKNIGDDIDDEKLKELFCEYGPTESVKVIRDASGKSKGFGFVRYETHEAAQKAVLDLHGKSIDGKVLYVGRAQKKIERLAELRRRFERLRLKEKSRPPGVPIYIKNLDETINDEKLKEEFSSFGSISRAKVMMEVGQGKGFGVVCFSSFEEATKAVDEMNGRIVGSKPLHVTLGQARRRC

SEQ ID NO: 10597 - DNA, 3446 bp, Homo sapiens
aggaagcgggaagttacttagcacggttccgggtttctcgcgccccgcctgtcccccctccctatcactgctactggctcttggtccctccgttggactgtcctgcggagagaaaccccagcccatcggtctgcgctgggaccgcccgccgcgcatctgcccttcttcgctgactccgccccgcatctggccagacccgcctcgcgtcagagctgacccactcactgcgcgtttgccagtcagtctctccggacctgcctcgagcctcaggctgctgaaatcaccgcgcctcactcgcctcgacagtgattctgagtctgcttttagcttccttttgcctgccttggctttttctgttcgtgaacagctgtttggcccatagcttagagaaagcagccttttttctcttcaaagagaacctcctcccagtgctcagagagatggggagcggggagcctaatcctgctggcaagaaaaagaagtatctcaaggccgctctgtacgtgggtgacttggacccagatgtcaccgaggacatgctctataagaagttcaggcctgctggccctctgcgattcacccgaatctgccgtgatccggtgacccgcagccccctgggctatgggtatgttaacttccgctttcccgcggatgcagagtgggccttgaacaccatgaattttgatttgattaatggaaaaccattccgccttatgtggtctcagccagatgaccgcttaagaaagtctggagtgggaaatatattcatcaaaaacctggacaaatccatagacaatagggccctgttttacttattttctgcttttgggaacattctgtcctgcaaagtcgtatgcgatgacaacggctctaagggttatgcctatgttcactttgacagcctggccgctgccaatagagccatctggcacatgaatggagtgcggctcaacaaccgccaggtgtatgttggcagattcaaattcccagaagagcgggcggctgaggtcagaaccagggatagagcaactttcaccaatgttttcgttaaaaacattggagacgacatagatgacgaaaaactgaaggaacttttctgtgaatatgggccaactgagagtgttaaagtaataagagatgccagtgggaaatctaaaggctttggatttgtgagatatgagacacacgaggctgcccaaaaggctgtgctagacttgcatggaaagtccatcgatggaaaagtcctctatgtagggcgagcacagaagaaaattgaacgcctggctgagttgaggcggagatttgaacggctgaggttaaaagaaaaaagtcggcccccaggggtgcctatctatattaagaacttggatgagacaatcaatgatgaaaaactgaaggaggaattttcttcctttgggtcaattagtcgggccaaagtgatgatggaagtggggcaaggcaaaggatttggtgtggtctgcttttcctcttttgaagaggctaccaaagcagtggatgagatgaatggccgcatagtgggctccaagcccctgcatgtcaccctgggccaggccaggcgcaggtgctgagaataagaatgctcagtttgtttcagccttagttggtgcctccttagtttgggctcctttgtgataaggggttattttatgctaattcacaagtttttttttgaagtgaattcttttgaaaaaaaaatgcaaaactagaaaactttattcattttagaatagaacataatttctaactgtaaaattgtcattttgtactttttttgatgtaatatccttagaaatctgtagaataaagtgtattcctccacttttttttcctgaacagtcaaggtgaggcaattgattgagtatatttcccttcttatttcagtaatactctattttttttcatgaaaatgtcaacatggttcttctgaatctatcacagtgaaaagttctaacttgtttttgagaagtcagtacagcaggggaaaacatatgtgatgcaattaacatctgcataatttcacttaaaattattatgcaaaaatgaatgttttttcaaaaaatgtgaaatgtattttattttctttatttgtattcttgtttcattttttaatatgttgtgaacatgctacagatttgatagtacttttgactaaatgttgggagtggtcgtattaacttcttgcccaaagaagtaagcatattggtgttttctcaattagtcactgagaaaattaacactttaggcagtggctatttaaagtaggaattgcatcttaaaaacctttcctaagagatttggtatgtgaggatactttcagtaccactcctaccattcatttttctaaattccttagtacatatacttggatcatgttaaattaacaagaaagatgaataactgcgctgaattgcctttacctataaataatttaatattttaccttcgggttttatcaactgtcaatataaaaggcagtactccacagaatgatgttgaaaaacttcttcgaagaacaccttctattaaacttgttatctcttgtaaattattgtgtgtgtccttttgataatattcacaggtgtttcaaaggtaaggaataggttgtctcttggattaagtcatatgcctccagccattatatgagaactgtgaaaccaatatggttttctttatgtcttggctgcttgaaaattaaaaaaaaaaaaggtttgttcaatattgccgttacatttattagcctgtaatttctaaattggagattctctacatttcacttgcagtttcctgttctcctcattgcctgccttccattcatattacacttatttttctattttttgtattacctttttaaaaatatataccagttcaagtccttttaggaagaagaaaatacctaatttatgtaaaatttaaataattacttttttataatatgattcacttatgccacagattcaacattagaatatgttttatctctactgtcagttttattaccttatatacaaatcttcattttcatacatagtacaatgtaaatatataactttgttaacacttttgttagctctttgaccataaaataatgacaataagctgtttctatgtatttgtttatctacaaattacaggtttatccatttgcaaatattttcaaaatggaaatcactgtttatattgattataaacataagacatgctcattgtaaaaaatgtacacaaggcagaaggaagtaaaatttccacagttcagaaataccacaattaatattttcaatgtgtaaatatcttttcataatttttcctacgtatacacaaacattttgaccaaaaatccacactatatgtactgttctgtatttttaattttaaactgaacaataatcatcttttcctgacaataaatatcaatctctatcatc

SEQ ID NO: 10598 - protein, 382 aa, Homo sapiens; identical to SEQ ID NO: 1345

SEQ ID NO: 10599 - DNA, 2337 bp, Homo sapiens
gcgcgtttgccagtcagtctctccggacctgcctcgagcctcaggctgctgaaatcaccgcgcctcactcgcctcgacagtgattctgagtctgcttttagcttccttttgcctgccttggctttttctgttcgtgaacagctgtttggcccatagcttagagaaagcagccttttttctcttcaaagagaacctcctcccagtgctcagagagatggggagcggggagcctaatcctgctggcaagaaaaagaagtatctcaaggccgctctgtacgtgggtgacttggacccagatgtcaccgaggacatgctctataagaagttcaggcctgctggccctctgcgattcacccgaatctgccgtgatccggtgacccgcagccccctgggctatgggtatgttaacttccgctttcccgcggatgcagagtgggccttgaacaccatgaattttgatttgattaatggaaaaccattccgccttatgtggtctcagccagatgaccgcttaagaaagtctggagtgggaaatatattcatcaaaaacctggacaaatccatagacaatagggccctgttttacttattttctgcttttgggaacattctgtcctgcaaagtcgtatgcgatgacaacggctctaagggttatgcctatgttcactttgacagcctggccgctgccaatagagccatctggcacatgaatggagtgcggctcaacaaccgccaggtgtatgttggcagattcaaattcccagaagagcgggcggctgaggtcagaaccagggatagagcaactttcaccaatgttttcgttaaaaacattggagacgacatagatgacgaaaaactgaaggaacttttctgtgaatatgggccaactgagagtgttaaagtaataagagatgccagtgggaaatctaaaggctttggatttgtgagatatgagacacacgaggctgcccaaaaggctgtgctagacttgcatggaaagtccatcgatggaaaagtcctctatgtagggcgagcacagaagaaaattgaacgcctggctgagttgaggcggagatttgaacggctgaggttaaaagaaaaaagtcggcccccaggggtgcctatctatattaagaacttggatgagacaatcaatgatgaaaaactgaaggaggaattttcttcctttgggtcaattagtcgggccaaagtgatgatggaagtggggcaaggcaaaggatttggtgtggtctgcttttcctcttttgaagaggctaccaaagcagtggatgagatgaatggccgcatagtgggctccaagcccctgcatgtcaccctgggccaggccaggcgcaggtgctgagaataagaatgctcagtttgtttcagccttagttggtgcctccttagtttgggctcctttgtgataaggggttattttatgctaattcacaagtttttttttgaagtgaattcttttgaaaaaaaaatgcaaaactagaaaactttattcattttagaatagaacataatttctaactgtaaaattgtcattttgtactttttttgatgtaatatccttagaaatctgtagaataaagtgtattcctccacttttttttcctgaacagtcaaggtgaggcaattgattgagtatatttcccttcttatttcagtaatactctattttttttcatgaaaatgtcaacatggttcttctgaatctatcacagtgaaaagttctaacttgtttttgagaagtcagtacagcaggggaaaacatatgtgatgcaattaacatctgcataatttcacttaaaattattatgcaaaaatgaatgttttttcaaaaaatgtgaaatgtattttattttctttatttgtattcttgtttcattttttaatatgttgtgaacatgctacagatttgatagtacttttgactaaatgttgggagtggtcgtattaacttcttgcccaaagaagtaagcatattggtgttttctcaattagtcactgagaaaattaacactttaggcagtggctatttaaagtaggaattgcatcttaaaaacctttcctaagagatttggtatgtgaggatactttcagtaccactcctaccattcatttttctaaattccttagtacatatacttggatcatgttaaattaacaagaaagatgaataactgcgctgaattgcctttacctataaataatttaatattttaccttcgggttttatcaactgtcaatataaaaggcagtactccacagaatgatgttgaaaaacttcttcgaagaacaccttctattaaacttgttatctcttgt

SEQ ID NO: 10600 - protein, 382 aa, Homo sapiens; identical to SEQ ID NO: 1345

SEQ ID NO: 10601 - DNA, 739 bp, Homo sapiens
ttctccttcaccttccgccgtgattgcaagtttcctgaggcctccccagccatgctgaactggttctgcaggatatacacgaagtatggcaccaacatctgcttctggtgaaggcttcatgaagcttccacccatgacagaaggcgaagaactgttgccagcatcatgctacaagcctgaagggaaggtctactgacagagaaggacagagaccagggaaacacagaaaaggagagacaaagccttgacataccaaaccagtgcctggcctacctatggacttctcatgccaacttgggagacatattatcaagactgaatcagagagttgacagcataccaggaagtgtcactgtatagtttggaagatggaaatcatactacttttttcccatgtaagcactccaggaaattaacctccaaatacaactgaggaataggcaccgttatggcttttttacagatcaataaactgatgaaatacggtgaagctatgtaagtagaccaaagatgtacaagaagacacacattgagcagaaaataaatttaagcctggcttctcaactctttatttaaccagagacggttctatctcaaacatgaggttctatatgaaagcaggagggaattaggaagtaaaatctggtgagcatttttcctgaaatattacagctgtcattctcagggccctcgtcctgagatagtggcaggttaagatattaaatttttatttctctgg

SEQ ID NO: 10602 - protein, 36 aa, Homo sapiens
MAPTSASGEGFMKLPPMTEGEELLPASCYKPEGKVY

SEQ ID NO: 10603 - DNA, 339 bp, Homo sapiens
atgcagccagattgctcctttaagtgggtccctgatctcattcctcctgaactgggaccagtcattccagatagtggttattcatcatcccacgcagaggccacctatgaagaaggcttggaagtatttgacccctattatttcatcaaacatgtcccaccactgacagaagaacaactaaataggaaatctgttcttccgttgaaaacaagaagcacaccgaaattctccctagatttacacttggatgaaacagtagtgcactgtagtctaaatgaggtagaagaggcagcacttacttttccagtccttttccaagatgtcatttatcaggtttag

SEQ ID NO: 10604 - protein, 112 aa, Homo sapiens
MQPDCSFKWVPDLIPPELGPVIPDSGYSSSHAEATYEEGLEVFDPYYFIKHVPPLTEEQLNRKSVLPLKTRSTPKFSLDLHLDETVVHCSLNEVEEAALTFPVLFQDVIYQV

SEQ ID NO: 10605 - DNA, 6575 bp, Homo sapiens
cctactaccaggtcattgtgcaggagaacaacacgcctggcgcctatctgctctctgtgtctgctcgcgaccccgacctgggtctcaacggcagtgtctcctaccagatcgtgccgtcgcaggtgcgggacatgcctgtcttcacctatgtctccatcaatcccaactcaggcgacatctacgcgctgcgatcctttaaccacgagcagaccaaggcgttcgaattcaaggtgctggccaaggacggcggccttccctcactgcaaagcaacgctacggtgcgggtcatcatcctcgacgtcaacgacaacaccccggtcatcacagccccacctctgattaacggcactgccgaggtctacataccccgcaactctggcataggctacctggtgactgttgtcaaggcagaagactacgatgagggcgaaaatggccgagtcacctacgacatgaccgagggcgaccgcggcttctttgaaatagaccaggtcaatggcgaagtcagaaccacccgcaccttcggggagagctccaagtcctcctatgagcttatcgtggtggctcacgaccacggcaagacatctctctctgcctctgctctcgtcctaatctacttgtcccctgctctcgatgcccaagagtcaatgggctctgtgaacttgtccttgattttcattattgccctgggctccattgcgggcatcctctttgtaactatgatcttcgtggcaatcaagtgcaagcgagacaacaaagagatccggacctacaactgcagaattgctgagtactcctatgggcatcaaaagaaatcaagcaagaagaaaaaaatcagtaagaatgacatccgcctggtaccccgggatgtggaggagacagacaagatgaacgttgtcagttgctcttccctgacctcctccctcaactattttgactaccaccagcagacgctgcccctgggctgccgccgctctgagagcactttcctgaatgtggagaaccagaatacccgcaacaccagtgctaaccacatctaccatcactctttcaacagccaggggccccagcagcctgacctgattatcaacggtgtgcctctgcctgagactgaaaactattcttttgactccaactacgtgaatagccgagcccatttaatcaagagcagctccaccttcaaggacttagagggcaacagcctgaaggatagtggacatgaggagagtgaccaaactgacagtgagcatgatgtccagcggagcctgtattgtgatactgctgtcaacgatgtgctgaacaccagtgtgacctccatgggatctcagatgcctgatcatgatcagaatgaaggatttcattgccgggaagaatgccggattcttggccactctgacaggtgctggatgccccggaaccccatgcccatccgttccaagtcccctgagcatgtgaggaacatcatcgcgctgtctattgaagctactgctgctgatgtcgaggcttatgacgactgcggccccaccaaacggactttcgcaacctttgggaaagatgtcagcgaccacccggctgaggagaggcctaccctgaaaggcaagaggactgtcgatgtgaccatctgcagccccaaggtcaacagcgttatccgggaggcaggcaatggctgtgaggcgattagccctgtcacctcccccctccacctcaagagctctctgcccaccaagccttccgtgtcttacaccattgccctggctcccccagcccgtgatctggagcagtatgtcaacaatgtcaacaatggccctactcgtccctctgaagctgagccccgtggagctgatagcgagaaagtcatgcatgaggtcagccccattctgaaggaaggtcgcaacaaagagtcccctggtgtgaagcgtctgaaggatatcgttctctaaaccagtctccaggaagaagagaaagaaaccacactggctagtgaagaagcaggagcttcttgttttaattgctcaccaatggttggttcttgagtggctatatttcagagcttttcctaaatgtattgtttataggtgattatcattctgtgacagtcccttgtttcaacaggcagcaggggtgttcagttggagcaaattagctttggcttgagttgttcatggggccttgatgttggggaaacagagacaaattcagttgtgaaaagtattatgtattaagtgtttgaatttatatatttttctatgtcaaaattataatataaattaccattgtttgtggaggattacatttaaaaaagcaaaaagtgaaaaaaaaaagctctggacacctttaataagctcgccactgttttttgtagtgtagacaagttaatggtcatttattgtgtactattcattgattcagtgatgtgaaattgagcccccaaaaggttgtttctgaagctcgagtacttcccaatgccgctactttgctgtggacacccctgctttaaaaacccttttgctagctgtgctattgttgtatttgatattgcaaattgctatgtgtgtggtgatggcaaaaggcttttaaaagttggtgttttctttttcttaaaaaaataataaaactacagacaaaaacaaagtgcaaacaactgagacagcaaatgaatgagcaacaccatgcatatagattgagtacttggagaatactcacgttttttaactcatgtagtgattgctcaccactttgcaaagtatttttcctgcctttcagtggtctgcccaggtccatgatagatcattgcagaaagtcatttttggataggctgctatctaatttgcagttgtcagaaatactgtgctgaaagttttatgacatccatcttttaaattttcaggccctgaacaggaaagttgctcctgaagttatgtttccaggcttagaaattccctctctccaatcatctaaaattgaagatgactgaatctattttaagatctaaattagcatctcttcagacacacacttcctgattcagtgtttcccaatcatgattagaattagactgcaaagcacgtcatgggctgggattgagaactccatgttgctctgtatcttaggcttatatacgtagggatagagtaagcagtacaaagtgtatattttggaaaagacaggtaacaggtaacagcatcgctaatccaattactgtgccttctaaacggagacactcagacacttgaactcatctttttatgactaatagttttttgattaaaaatgtgaacaagaaaatactaaaataaaaatcctttcgatttagccaactctttttgctgtaggctaggaatacaccctttttaaattaacacactgtagatcctttttttctgttttaacattcctctaactcccccatttatcttttgtctattaatattcactagccaacatagtatttttgcagcctaagagttcattatttaaaaataaactaaagaaatatgtcacctttgttctgccttggtcttaagagagttgtttctagagaaacaagttttatggttctgttttcatttgtttcattttttgaaattcaggaatacacagagagaaggcctagaggttagagcactagaatgcaaaagaggatttattttcttaagtttaggtagataagtcagctcttttgaatgttttacttatttttgcctgagttcctagctttacgcattactaggaatattttcttttacaggagggagaagggttttgagggagggggtgggtaaggcagtagggatggggttaggtaggggagaacatttctgaaaaagaacttataatgaagctacaaatccatccttatttcttattcagtgctgaatactacctcatgcaaaatattggtgtggctgcaaatttccctctgaagctgacacaattaaggatgaattaccataacatcttcatttttcctcatttcattgcctctcatacagttttctccctctgatttatttcattttggtagtggattttgaattaagtatttatttctctttgcaagtgactatttgattaacacattaaaaattttttaaaaatttcccctttaagttatgatggctgcctatagaatttagactgtttctcaccctgatccatcctgatattatgttattagctacgatttcaaggtcactttgaagtcagacttcacagttttctacaggtgtatttcttgctatgctcagtgggaaccagggagcagaaaagattgtggaaagtgggaacattaattgtcacgtggctgttgagccagagaggccactggctgccatgcctcttaccagccaagttttaaatggttagagtggcattggcattgattttgcttttctcttgggttttcttcatttcttttcataattcatcttcaagctatagatccatccttcttccctatccaaatactttgttctcagtgggcagtcagatttttttggcttccaaacctcactgagcatgttcagagaattcctctcattaaggaaatatttttccccacaattgtctgatgtatgagtcctctcagaagcacaagtgcatactaggaaggctttgtaaactggttttgtaggcaggctgtacctgcaaataggcattctgagcaaggatcctaaatttccctttggctcatgtcccccccgccccaccccaccttctcctttttggcatgtctggtgaaaagctacaaggttcacagggccaaatattctcccttttgttctctaaacatgttgcacacataaactcaagggagtgatttcggttcctaagtcctagggagttctattccatttattctgatgtcccttttaaggaggagttggtgttgaagtgtgacatgctttaatgataactgctttggcaattccccagacaggtatacttcttcatccaaaattgcacctaaggtgttcatttagacaaaattgttcgcttagtgatccactgatctctaatcagaaatatttttaaaaaatacaatttagatctctgaaaattggaaccactcaagagtatcatcttgatagtgttacttcagcatatgactgactgattttatgaagggagtttagctgacttttccctgtagccctatcatattaaaaacaaaaagtggtccacttgaagcagcaaggacaaagggcagtttagggagaggcagggtgaaggggatagctcgattgggcatccagagtggaaaaggattattattgtacataatagcagttctggctggaattccaatccactttctggggatcattttgatgttgaatgttcccccaaagcattctgacaagtttggtccacttggctctttaccccgggtaataagacccttattgactttgaaaaactggcataaatgagcttaagaaatccattgtatacagtcctagtgtttgccttcttggtaaaattacatttaaggatgtcatttcatgagtcaaattgtatctgctgacactgaagtgtattgagatgttgttctttagtttaagtatgtaacaaagtaatattcaaaggggatgtttgggggtggggctgggaccgggtggctttatattgataatgaaatattccagagcaaaacacattgtcctaatgaagttgttgcagctctcttcgttttcttgtgccgctggaattggcttgtgggtcacttgttgtgcaaaagtgaattaatttcaaataggaatcatattgcttttgtgaaacaaagaaaatttaccaccttgtctgatacatagattggaaggcgctcttggtaaagaataacccacaaacacctgatcttgattggaaagcattgtaggtcattagggaaaactgatgatgctgactgttgctccagctgtgttggcaattcaagatgaccttgttactaactgaaagttgctgtcaaccttagcaaacaaaccagctaacaccattacagcactggttaagtagatttttactggcactggctggcgttcagctgaggaaggctaggatacagactttaatgaccaagagccagactagctcgagctagaaatcagcaacaaatacctccttgtgctatttgaatgctaaggtattagttgcaataggcttacgccttcgctcctctagtgaggggaatgagcctgatgacactattactgtttacctgtcaaaccagggtggaaatttagagggatgcaagtacagtatgtctcattaagcagtctctgttgctgattatatgaagataaaattgttgtatatgctgatctgtatgttatgtacattttcacagtgattgaatcattgtaaaaagaaaaaagacaaaaaagaatcaccactgtctattttatgaagatgataaagcagctttattaaattattacagttatgtttcaaatggtgttatctgccacattgtttccttttatctggtggttctctgtttccccctttaaatgtgttttctctgcttcaaaaatttaatgcattttagtattaaaggctattatggaaaaagtatt

SEQ ID NO: 10606 - protein, 602 aa, Homo sapiens
MPVFTYVSINPNSGDIYALRSFNHEQTKAFEFKVLAKDGGLPSLQSNATVRVIILDVNDNTPVITAPPLINGTAEVYIPRNSGIGYLVTVVKAEDYDEGENGRVTYDMTEGDRGFFEIDQVNGEVRTTRTFGESSKSSYELIVVAHDHGKTSLSASALVLIYLSPALDAQESMGSVNLSLIFIIALGSIAGILFVTMIFVAIKCKRDNKEIRTYNCRIAEYSYGHQKKSSKKKKISKNDIRLVPRDVEETDKMNVVSCSSLTSSLNYFDYHQQTLPLGCRRSESTFLNVENQNTRNTSANHIYHHSFNSQGPQQPDLIINGVPLPETENYSFDSNYVNSRAHLIKSSSTFKDLEGNSLKDSGHEESDQTDSEHDVQRSLYCDTAVNDVLNTSVTSMGSQMPDHDQNEGFHCREECRILGHSDRCWMPRNPMPIRSKSPEHVRNIIALSIEATAADVEAYDDCGPTKRTFATFGKDVSDHPAEERPTLKGKRTVDVTICSPKVNSVIREAGNGCEAISPVTSPLHLKSSLPTKPSVSYTIALAPPARDLEQYVNNVNNGPTRPSEAEPRGADSEKVMHEVSPILKEGRNKESPGVKRLKDIVL

SEQ ID NO: 10607 - DNA, 375 bp, Homo sapiens
gtcctaatctacttgtcccctgctctcgatgcccaagagtcaatgggctctgtgaacttgtccttgattttcattattgccctgggctccattgcgggcatcctctttgtaactatgatcttcgtggcaatcaagtgcaagcgagacaacaaagagatccggacctacaactgcagtaattgtttaaccatcacttgtctcctcggctgttttataaaaggacaaaacagcaagtgtctgcattgcatctcggtttctcccattagcgaggagcaagacaaaaagacagaggagaaagtgagcctaaggggaaagagaattgctgagtactcctatgggcatcaaaagaaatcaagcaagaagaaaaaaatcagt

SEQ ID NO: 10608 - protein, 110 aa, Homo sapiens
MGSVNLSLIFIIALGSIAGILFVTMIFVAIKCKRDNKEIRTYNCSNCLTITCLLGCFIKGQNSKCLHCISVSPISEEQDKKTEEKVSLRGKRIAEYSYGHQKKSSKKKKI

SEQ ID NO: 10609 - DNA, 3575 bp, Homo sapiens
aatagcagagaagggctagggagcggttgccgagcaggggctctaccgcgggcgggcagctgtgccagctaaccgtctgggatctcgcactgggggctgcagcttttccccgcctcgagccagtgtgcgggggcgggagaagagccagggggagcgggctgggcccggggctgcggctgcggccgcggggctgcggctccccagccccgccagctggagcgctcggaggtagaggaaaggtcttgacggggtggctggatccgtggcagaatccagttccagattctagacttgagggttctgggctgttggtctgtagaagcgaaggagagaaggactcaaatccaggccaagtgtatggctgtctgaggtattggaacagaaggaggtccattcctgttggtgacaacaccgtggccctgttctgggatgagcaaggtgtaaaggtttcccccaagaaagagcagctgagtccttgcatcttgtggcagctggtgtgcccagcactgagtctgtaggagctgaagccagcccggacccttctcatgggcagtgcccacctgtgctgaagtcctgcagcggtggcggtgtgaggagctgtgaaattagttgtaactgaaaatgtctgacggtctggataatgaagagaaacccccggctcctccactgaggatgaatagtaacaaccgggattcttcagcactcaaccacagctccaaaccacttcccatggcccctgaagagaagaataagaaagccaggcttcgctctatcttcccaggaggaggggataaaaccaataagaagaaggagaaagagcgcccagagatctctcttccttcagactttgagcatacgattcatgtggggtttgatgcagtcaccggggaattcactggaattccagagcaatgggcacgattactccaaacttccaacataacaaaattggaacagaagaagaacccacaagctgttctagatgttctcaaattctatgattccaaagaaacagtcaacaaccagaaatacatgagctttacatcaggagataaaagtgcacatggatacatagcagcccatccttcgagtacaaaaacagcatctgagcctccattggcccctcctgtgtctgaagaagaagatgaagaggaagaagaagaagaagatgaaaatgagccaccaccagttatcgcaccaagaccagagcatacaaaatcaatctatactcgttctgtggttgaatccattgcttcaccagcagtaccaaataaagaggtcacaccaccctctgctgaaaatgccaattccagtactttgtacaggaacacagatcggcaaagaaaaaaatccaagatgacagatgaggagatcttagagaagctaagaagcattgtgagtgttggggacccaaagaaaaaatacacaagatttgaaaaaattggtcaaggggcatcaggtactgtttatacagcactagacattgcaacaggacaagaggtggccataaagcagatgaaccttcaacagcaacccaagaaggaattaattattaatgaaattctggtcatgagggaaaataagaaccctaatattgttaattatttagatagctacttggtgggtgatgaactatgggtagtcatggaatacttggctggtggctctctgactgatgtggtcacagagacctgtatggatgaaggacagatagcagctgtctgcagagagtgcctgcaagctttggatttcctgcactcaaaccaggtgatccatagagatataaagagtgacaatattcttctcgggatggatggctctgttaaattgactgactttgggttctgtgcccagatcactcctgagcaaagtaaacgaagcactatggtgggaaccccatattggatggcacctgaggtggtgactcgaaaagcttatggtccgaaagttgatatctggtctcttggaattatggcaattgaaatggtggaaggtgaacccccttaccttaatgaaaatccactcagggcattgtatctgatagccactaatggaactccagagctccagaatcctgagagactgtcagctgtattccgtgactttttaaatcgctgtcttgagatggatgtggataggcgaggatctgccaaggagcttttgcagcatccatttttaaaattagccaagcctctctccagcctgactcctctgattatcgctgcaaaggaagcaattaagaacagcagccgctaagactgcaagccttacacctcaccatctccctcatgagtaagactgaaataaaactctgctgcaggaaagatggaagaaaagacagtcaaatggggtgggggttctttacctttcaaatgaatagaaacttcttataagcctttttcctactccctcagattatgtaatttatttgtaagcctgaatcgcagcccaaacagggcagcaatgttgaagtgaccataaagtggtcacttccaccgtgaagcgaaagagccagtagtgaatcccctcattttgtgcattcactttgaagaaaaaggtttctcaaagatgcacactccctcttcatagtgttgtgtttgtttttaagttagagagtagtccctcttgcattcaaacctccttcaaaactccttacccaatgtgatgtttttcacttgcattgtcattagatgtccagaaaaaaaaaagatgtcaaaatgtttttctaaaaaaagaaagcaaaaaaagcaaggcaaaaaaaaaaaaaaaaacaaacaaaaacaaaaacaaaacaaaaacaagcaaacaaaaaataccagagcaagtactgtgtgaacatgtggaagtccatgccctaatagagttgcaattttttattcttcttctatagtggtggcttggtttgtgtacctatttttctgcatttgtattggaaaaggtttcttttaagacattttccaaaagtggagaggaatatgtgtgttcaggaagggctttcaaaaaactgtatatctaaataaagctcaaacggtgaaatcctgtcacattttcacaatgatgcttaaaagataattgagtaaaccaggttgttaatctccttaatacctgaaagaggacacactgaaactgaaactgtgacatcctgctaggtgagttcaggttctgaacctaggaaatcctcataggagaaaccacatttaaacaaagatgggactttctctgagagccaaaaccagataaatgtagaatactgaaatccttgttggacattaagtaaacaaagataatgatacctaaattaatcctctcttgtgcttatgaaacatatgcactgtaaaataggcataccaggaggaaatagatacattaatcatcatttacttatgatacaaattatttattttgacaatttataacgtttaaaaaagttttttaaagatctagagaaaggtgatatagtaaacattcaactctgtaagaaatgggaggtcagtgaaggctacatcccaatcaatatttggctctaagtacctcttcccatttttcctatgtatcacctatttctgtttcggaat

SEQ ID NO: 10610 - protein, 544 aa, Homo sapiens
MSDGLDNEEKPPAPPLRMNSNNRDSSALNHSSKPLPMAPEEKNKKARLRSIFPGGGDKTNKKKEKERPEISLPSDFEHTIHVGFDAVTGEFTGIPEQWARLLQTSNITKLEQKKNPQAVLDVLKFYDSKETVNNQKYMSFTSGDKSAHGYIAAHPSSTKTASEPPLAPPVSEEEDEEEEEEEDENEPPPVIAPRPEHTKSIYTRSVVESIASPAVPNKEVTPPSAENANSSTLYRNTDRQRKKSKMTDEEILEKLRSIVSVGDPKKKYTRFEKIGQGASGTVYTALDIATGQEVAIKQMNLQQQPKKELIINEILVMRENKNPNIVNYLDSYLVGDELWVVMEYLAGGSLTDVVTETCMDEGQIAAVCRECLQALDFLHSNQVIHRDIKSDNILLGMDGSVKLTDFGFCAQITPEQSKRSTMVGTPYWMAPEVVTRKAYGPKVDIWSLGIMAIEMVEGEPPYLNENPLRALYLIATNGTPELQNPERLSAVFRDFLNRCLEMDVDRRGSAKELLQHPFLKLAKPLSSLTPLIIAAKEAIKNSSR

SEQ ID NO: 10611 - DNA, 1878 bp, Homo sapiens
ggctcgtggctacccgaaagtagttactcagatcactgttcacagtgctgaggacctggagaagaagtatgccaatgaaactgtaaacccatatttggtcatcaaatgtggaaaggaggaagtccgttctcctgtccagaagaatacagttcatgccatttttgacacccaggccattttctacagaaggaccactgacattcctattatagtacaggtctggaacagccgaaaattctgtgatcagttcttggggcaggttactctggatgctgaccccagcgactgccgtgatctgaagtctctgtacctgcgtaagaagggtggtccaactgccaaagtcaagcaaggccacatcagcttcaaggttatttccagcgatgatctcactgagctctaaatctgcaatcccagagaatcctgacaaagcgtgccacccttttattttccgtcaggtgccaggtcttagttaagattcacaatctttagaaagaatgagattcacaataattaactcttcctctcttctgataaattccccatacctcccaatccaagtagcatctgtagctacataacctatatacctccagcagctggacatggggaggcgacagtcctatctagacatcatacacatttgccaagaaaggatctctggggcttccgggggtgagattcaagtaggacaataacaagaggctggacaccctacagatgtctttgatgttttcagttgtttgatatatctcccctgtagggcatgttgaggaaggaggagggctgatcaaggccaagctggtctagcctgacatcctagctcctgactgaacactatagacttcccagcagcatttcacccagcagccagagccggctttaagtccccaacccttacagacaccactgccaccaccaccaaccacgaccaccaccaccaccaccactcaccaccatcatcacctccggaaagtgtagtcctgccctaacccaagtcacccccgacagtaaattttaccttcatgttgagaaagcttcctggtgcttaatcaagagctggagttcaatgagtcctagacagtgagaggggcctgagcttcagctcaatggaagcctgctgtgtgccacaagacggaaaagtggaagaagctgcagtgggagacaaagcctcggtcccccacccatccacacacacctacactcacacacgcgcacatgggcgcgcacgaactaccattcaggcagtcagtgggcaagaggaaagataagtaagtaccatacacacctaaaagatgagagaattcatccagacatattacagccagtttggggcccctgactgcaatgtgaaacctctcgctgctgctaggtttacaaacaagcccattgtcctgtgcctcctaatatcatttgtactgaagaccccatctggggacttgagactttggtcccagcccagactcctcagacttttctctcagttgggatgcttcactcgctgggggtgtttgtttgccctctcatttttcagtacttctacagaattttctctagagtcagtcattatgaaatgtacttccctccatcttaacctatcaactttctgcccctccttcaaggcccagtataaatgccacctcctccatgaagccttccctaattccaccccaaacccccaccttcaacaatatttcaacgcttctgcaatgatgaaaaagaaacatagttgtagtacttagcctacctagaccagcaagcattcatttttagctcgctcattttttaccatgttttccagtctgtttaacttctgcagtgccttcactacactgccttacataaaccaaatcacaataaagttcatattcagtacattga

SEQ ID NO: 10612 - protein, 148 aa, Homo sapiens [sequence omitted]

SEQ ID NO: 10613 - DNA, 3713 bp, Homo sapiens
atcccgtctgcacatctggtagaggcactttccacattttcctcatgactcaggatcagtttctgactgctgggcggggcaaagcctcctgaagttgctgcgaggcacctccccctgtgagcagagcttggtacagcccaaatagttttcaggttaagaaagccagaatctttgttcagccacactgactgaacagacttttagtggggttacctggctaacagcagcagcggcaacggcagcagcagcagcagcagcagcagcagcagcagcagggctcctgggataactcaggcatagttcaacactatgggtcctcctctgaagctcttcaaaaaccagaaataccaggaactgaagcaggaatgcatcaaagacagcagacttttctgtgatccaacatttctgcctgagaatgattctcttttctacaaccgactgcttcctggaaaggtggtgtggaaacgtccccaggacatctgtgatgacccccatctgattgtgggcaacattagcaaccaccagctgacccaagggagactggggcacaagccaatggtttctgcattttcctgtttggctgttcaggagtctcattggacaaagacaattcccaaccataaggaacaggaatgggaccctcaaaaaacagaaaaatacgctgggatatttcactttcgtttctggcattttggagaatggactgaagtggtgattgatgacttgttgcccaccattaacggagatctggtcttctctttctccacttccatgaatgagttttggaatgctctgctggaaaaagcttatgcaaagctgctaggctgttatgaggccctggatggtttgaccatcactgatattattgtggacttcacgggcacattggctgaaactgttgacatgcagaaaggaagatacactgagcttgttgaggagaagtacaagctattcggagaactgtacaaaacatttaccaaaggtggtctgatctgctgttccattgagtctcccaatcaggaggagcaagaagttgaaactgattggggtctgctgaagggccatacctataccatgactgatattcgcaaaattcgtcttggagagagacttgtggaagtcttcagtgctgagaaggtgtatatggttcgcctgagaaaccccttgggaagacaggaatggagtggcccctggagtgaaatttctgaagagtggcagcaactgactgcatcagatcgcaagaacctggggcttgttatgtctgatgatggagagttttggatgagcttggaggacttttgccgcaactttcacaaactgaatgtctgccgcaatgtgaacaaccctatttttggccgaaaggagctggaatcggtgttgggatgctggactgtggatgatgatcccctgatgaaccgctcaggaggctgctataacaaccgtgataccttcctgcagaatccccagtacatcttcactgtgcctgaggatgggcacaaggtcattatgtcactgcagcagaaggacctgcgcacttaccgccgaatgggaagacctgacaattacatcattggctttgagctcttcaaggtggagatgaaccgcaaattccgcctccaccacctctacatccaggagcgtgctgggacttccacctatattgacacccgcacagtgtttctgagcaagtacctgaagaagggcaactatgtgcttgtcccaaccatgttccagcatggtcgcaccagcgagtttctcctgagaatcttctctgaagtgcctgtccagctcagggaactgactctggacatgcccaaaatgtcctgctggaacctggctcgtggctacccgaaagtagttactcagatcactgttcacagtgctgaggacctggagaagaagtatgccaatgaaactgtaaacccatatttggtcatcaaatgtggaaaggaggaagtccgttctcctgtccagaagaatacagttcatgccatttttgacacccaggccattttctacagaaggaccactgacattcctattatagtacaggtctggaacagccgaaaattctgtgatcagttcttggggcaggttactctggatgctgaccccagcgactgccgtgatctgaagtctctgtacctgcgtaagaagggtggtccaactgccaaagtcaagcaaggccacatcagcttcaaggttatttccagcgatgatctcactgagctctaaatctgcaatcccagagaatcctgacaaagcgtgccacccttttattttccgtcaggtgccaggtcttagttaagattcacaatctttagaaagaatgagattcacaataattaactcttcctctcttctgataaattccccatacctcccaatccaagtagcatctgtagctacataacctatatacctccagcagctggacatggggaggcgacagtcctatctagacatcatacacatttgccaagaaaggatctctggggcttccgggggtgagattcaagtaggacaataacaagaggctggacaccctacagatgtctttgatgttttcagttgtttgatatatctcccctgtagggcatgttgaggaaggaggagggctgatcaaggccaagctggtctagcctgacatcctagctcctgactgaacactatagacttcccagcagcatttcacccagcagccagagccggctttaagtccccaacccttacagacaccactgccaccaccaccaaccacgaccaccaccaccaccaccactcaccaccatcatcacctccggaaagtgtagtcctgccctaacccaagtcacccccgacagtaaattttaccttcatgttgagaaagcttcctggtgcttaatcaagagctggagttcaatgagtcctagacagtgagaggggcctgagcttcagctcaatggaagcctgctgtgtgccacaagacggaaaagtggaagaagctgcagtgggagacaaagcctcggtcccccacccatccacacacacctacactcacacacgcgcacatgggcgcgcacgaactaccattcaggcagtcagtgggcaagaggaaagataagtaagtaccatacacacctaaaagatgagagaattcatccagacatattacagccagtttggggcccctgactgcaatgtgaaacctctcgctgctgctaggtttacaaacaagcccattgtcctgtgcctcctaatatcatttgtactgaagaccccatctggggacttgagactttggtcccagcccagactcctcagacttttctctcagttgggatgcttcactcgctgggggtgtttgtttgccctctcatttttcagtacttctacagaattttctctagagtcagtcattatgaaatgtacttccctccatcttaacctatcaactttctgcccctccttcaaggcccagtataaatgccacctcctccatgaagccttccctaattccaccccaaacccccaccttcaacaatatttcaacgcttctgcaatgatgaaaaagaaacatagttgtagtacttagcctacctagaccagcaagcattcatttttagctcgctcattttttaccatgttttccagtctgtttaacttctgcagtgccttcactacactgccttacataaaccaaatcacaataaagttcatattcagtacattga

SEQ ID NO: 10614 - protein, 641 aa, Homo sapiens; identical to SEQ ID NO: 1350

SEQ ID NO: 10615 - DNA, 3582 bp, Homo sapiens
atcccgtctgcacatctggtagaggcactttccacattttcctcatgactcaggatcagtttctgactgctgggcggggcaaagcctcctgaagttgctgcgaggcacctccccctgtgagcagagcttggtacagcccaaatagttttcaggttaagaaagccagaatctttgttcagccacactgactgaacagacttttagtggggttacctggctaacagcagcagcggcaacggcagcagcagcagcagcagcagcagcagcagcagcagggctcctgggataactcaggcatagttcaacactatgggtcctcctctgaagctcttcaaaaaccagaaataccaggaactgaagcaggaatgcatcaaagacagcagacttttctgtgatccaacatttctgcctgagaatgattctcttttctacaaccgactgcttcctggaaaggtggtgtggaaacgtccccaggacatctgtgatgacccccatctgattgtgggcaacattagcaaccaccagctgacccaagggagactggggcacaagccaatggtttctgcattttcctgtttggctgttcaggagtctcattggacaaagacaattcccaaccataaggaacaggaatgggaccctcaaaaaacagaaaaatacgctgggatatttcactttcgtttctggcattttggagaatggactgaagtggtgattgatgacttgttgcccaccattaacggagatctggtcttctctttctccacttccatgaatgagttttggaatgctctgctggaaaaagcttatgcaaagctgctaggctgttatgaggccctggatggtttgaccatcactgatattattgtggacttcacgggcacattggctgaaactgttgacatgcagaaaggaagatacactgagcttgttgaggagaagtacaagctattcggagaactgtacaaaacatttaccaaaggtggtctgatctgctgttccattgagtctcccaatcaggaggagcaagaagttgaaactgattggggtctgctgaagggccatacctataccatgactgatattcgcaaaattcgtcttggagagagacttgtggaagtcttcagtgctgagaaggtgtatatggttcgcctgagaaaccccttgggaagacaggaatggagtggcccctggagtgaaatttctgaagagtggcagcaactgactgcatcagatcgcaagaacctggggcttgttatgtctgatgatggagagttttggatgagcttggaggacttttgccgcaactttcacaaactgaatgtctgccgcaatgtgaacaaccctatttttggccgaaaggagctggaatcggtgttgggatgctggactgtggatgatgatcccctgatgaaccgctcaggaggctgctataacaaccgtgataccttcctgcagaatccccagtacatcttcactgtgcctgaggatgggcacaaggtcattatgtcactgcagcagaaggacctgcgcacttaccgccgaatgggaagacctgacaattacatcattggctttgagctcttcaaggtggagatgaaccgcaaattccgcctccaccacctctacatccaggagcgtgctgggacttccacctatattgacacccgcacagtgtttctgagcaagtacctgaagaagggcaactatgtgcttgtcccaaccatgttccagcatggtcgcaccagcgagtttctcctgagaatcttctctgaagtgcctgtccagctcagggaactgactctggacatgcccaaaatgtcctgctggaacctggctcgtggctacccgaaagtagttactcagatcactgttcacagtgctgaggacctggagaagaagtatgccaatgaaactgtaaacccatatttggtcatcaaatgtggaaaggaggaagtccgttctcctgtccagaagaatacagttcatgccatttttgacacccaggccattttctacagaaggaccactgacattcctattatagtacaggtctggaacagccgaaaattctgtgatcagttcttggggcaggttactctggatgctgaccccagcgactgccgtgatctgaagtctctgtacctgcgtaagaagggtggtccaactgccaaagtcaagcaaggccacatcagcttcaaggttatttccagcgatgatctcactgagctctaaatctgcaatcccagagaatcctgacaaagcgtgccacccttttattttccgtcaggtgccaggtcttagttaagattcacaatctttagaaagaatgagattcacaataattaactcttcctctcttctgataaattccccatacctcccaatccaagtagcatctgtagctacataacctatatacctccagcagctggacatggggaggcgacagtcctatctagacatcatacacatttgccaagaaaggatctctggggcttccgggggtgagattcaagtaggacaataacaagaggctggacaccctacagatgtctttgatgttttcagttgtttgatatatctcccctgtagggcatgttgaggaaggaggagggctgatcaaggccaagctggtctagcctgacatcctagctcctgactgaacactatagacttcccagcagcatttcacccagcagccagagccggctttaagtccccaacccttacagacaccactgccaccaccaccaaccacgaccaccaccaccaccaccactcaccaccatcatcacctccggaaagtgtagtcctgccctaacccaagtcacccccgacagtaaattttaccttcatgttgagaaagcttcctggtgcttaatcaagagctggagttcaatgagtcctagacagtgagaggggcctgagcttcagctcaatggaagcctgctgtgtgccacaagacggaaaagtggaagaagctgcagtgggagacaaagcctcggtcccccacccatccacacacacctacactcacacacgcgcacatgggcgcgcacgaactaccattcaggcagtcagtgggcaagaggaaagataagtaagtaccatacacacctaaaagatgagagaattcatccagacatattacagccagtttggggcccctgactgcaatgtgaaacctctcgctgctgctaggtttacaaacaagcccattgtcctgtgcctcctaatatcatttgtactgaagaccccatctggggacttgagactttggtcccagcccagactcctcagacttttctctcagttgggatgcttcactcgctgggggtgtttgtttgccctctcatttttcagtacttctacagaatcccaccttcaacaatatttcaacgcttctgcaatgatgaaaaagaaacatagttgtagtacttagcctacctagaccagcaagcattcatttttagctcgctcattttttaccatgttttccagtctgtttaacttctgcagtgccttcactacactgccttacataaaccaaatcacaataaagttcatattcagtacatt

SEQ ID NO: 10616 - protein, 641 aa, Homo sapiens; identical to SEQ ID NO: 1350

SEQ ID NO: 10617 - DNA, 9406 bp, Homo sapiens; identical to SEQ ID NO: 1351

SEQ ID NO: 10618 - protein, 441 aa, Homo sapiens; identical to SEQ ID NO: 1352

SEQ ID NO: 10619 - DNA, 9219 bp, Homo sapiens
ctttctctcagcatctccacccaaccagcagaaaaccggtgagtggggcttttaagtgattttcaagaagaatgtaacagatgtcaaacgggaaaagcacaaggcaaagcctgctctctctgtctctctgtctcctcttctccttttttgccttattctatccgattttttccctaagcttctacctgggattttcctttggaaaagtctctgaggttccaccaaaatatggaacttgattttggacactttgacgaaagagataagacatccaggaacatgcgaggctcccggatgaatgggttgcctagccccactcacagcgcccactgtagcttctaccgaaccagaaccttgcaggcactgagtaatgagaagaaagccaagaaggtacgtttctaccgcaatggggaccgctacttcaaggggattgtgtacgctgtgtcctctgaccgttttcgcagctttgacgccttgctggctgacctgacgcgatctctgtctgacaacatcaacctgcctcagggagtgcgttacatttacaccattgatggatccaggaagatcggaagcatggatgaactggaggaaggggaaagctatgtctgttcctcagacaacttctttaaaaaggtggagtacaccaagaatgtcaatcccaactggtctgtcaacgtaaaaacatctgccaatatgaaagccccccagtccttggctagcagcaacagtgcacaggccagggagaacaaggactttgtgcgccccaagctggttaccatcatccgcagtggggtgaagcctcggaaggctgtgcgtgtgcttctgaacaagaagacagcccactcttttgagcaagtcctcactgatatcacagaagccatcaaactggagaccggggttgtcaaaaaactctacactctggatggaaaacaggtaacttgtctccatgatttctttggtgatgatgatgtgtttattgcctgtggtcctgaaaaatttcgctatgctcaggatgatttttctctggatgaaaatgaatgccgagtcatgaagggaaacccatcagccacagctggcccaaaggcatccccaacacctcagaagacttcagccaagagccctggtcctatgcgccgaagcaagtctccagctgactcagcaaacggaacctccagcagccagctctctacccccaagtctaagcagtctcccatctctacgcccaccagtcctggcagcctccggaagcacaaggacctgtacctgcctctgtccttggatgactcggactcgcttggtgattccatgtaaaggaggggagagtgctcagagtccagagtacaaatccaagcctatcattgtagtagggtacttctgctcaagtgtccaacagggctattggtgctttcaagtttttattttgttgttgttgttattttgaaaaacacattgtaatatgttgggtttattttcctgtgatttctcctctgggccactgatccacagttaccaattatgagagatagattgataaccatcctttggggcagcattccagggatgcaaaatgtgctagtccatgacctttcaatggaaagcttaggtgcctgcgttatatttgccctgtctaattttgcccatacagtcttccttctgtagagggctgtttacatatacagcacttaaaatgtttgtgtgggaaaaaaaaaactcattggcagatccaagaatgacaaacacaagtgccccttttctctggatctcaagaatggtggaggaccctggaaggacagcaaggcagctccccagcctcactcttcactcctgattgaggcccgggtttgttgtccagcaccaattctggctgtcaatggggagaaataaaccaacaacttataattgtgacaccagatgcttaggatcctggtgctgggttagctaagagaatagacagaattggaaaatactgcagacatttccgaagagtttataaagcacagtgaattcctggtcaatctctccactgaggcaatttggaatcaataagcaattgataatagtttggagtaagggacttcatatacctgattcctctagaaggctgtctaacataccacatgattacatgaactgtatggtatccatctatctctgttctattgaatgccttgttaacagccaacactgaaaacactgtgagaatttgttttcaggtctgacacctttcagtctctttttatagcaagaaatcaatatcctttttataaaaattcatgtctgtatttcaggagcaaactcttcaggctccttttttataaactggtgatttttcttttgtctaaaaaacacatgaagaaaatttaccaaaaaaaaaaaaaaaagcagaagaataatgtagtttagaaattatgctgtcactgccaaacagtaacctccaggagaaaacaagatgaatagcagaggccaattcaatagaatcagttttttgatagctttttaacagttatgcttgcattaataatttcaatgtggaccagacattctaattatattttaaatgaaatgttacagcatattttaagcaactctttttatctataatcctaatatttcatactgaagacacagaaatctttcacttgtctttaacattagaaaggatttctctttactaaggactgatcatttgaaatagttttcagtcttttgagatacaggtttataacactgcttttttttttctgtaatcatagcccataatggcaaagacaactaaatttaagtgaaggtcatgcatgccaattctgtgtttgcttttagcagatatgaagatttccttatttctttgtaattgtgcagatattttgaaaggcacagcattcgaagccaagctgctgtttggctactgaatggcttgcagttgttcctccactctaaatggaatgagcttgctgtgtgtgtgtgtggtggtggtgggagggggtggtgcatgtgtgtgtgtgtgtgtgcatctgcagctgcttcaaaattaggaaatactacaggacacccctgtaatggattggtggcaactgggtggcactgctgatgtgcactgtgtaggggggaacccagtggtggtggggtagctcagatgcccctagacaagcttcagatgtctgtagctaccagaaacattttcggttcaggaaaagtgagatgatggtagtactggtttctggtgaaattgaagaaccccaaatgatgaggatctctttttgccccctctcctttttttgtagacccattcaaaaccattaataagcccattttactaagcccctatttctttctagaagctcagggttttcttagtgcctcccagaacattttgtagttaattgggaaaaagtgatacttggattagggggtgtgggcataaagaatggtgggaggcctgattttaaacttcaggccagaacccccaatgactccacccatagtctcactttaggtctcatttagtccatcacctttattttaagttgaggaagtggaggctggtaaagagcaggaccagaggaagaatccagatttccttatgcttgggcctcacactagctctctgagtatttccttgattgcggtatatgtactactagaaaataccaaatggatatattttctttaggataacctttgaaccaacaatcttcaataacaatagtacatcttccatcttacttttaatcgagtataaggaaatgtttctttatggccattttggagggagcaggggatgaggcttggcatagtccaaaatttaagtctccaataattaattgcattttaaattggcccactttcaaggcaattttttttgtgtgtctgtaactgagctcctccacccctgtcattcacttccaattttacccaatccaattttagcactcaagttccattgtgttaatttctgcacggtcaacaaacatcaagtcagcaagcatttgccaccactccctatacttctccctccttcttacacacacacacacacacacacacacaatccatctcttgcttgttcctacctcctgatttttcttccctacagaaatagaaatagggacaaagaaggggaaaatgtatatattggggctgggctgaacaactaacttcataagtagtattaactaggggtaaattgagagaaaagctccttttctcttcactgttttggaaaggatagccattagcatgactgctttgtgtccttatggactttagtattagcctagattgaattatagcgttttctagctggaaggaaccttaagatcacatcatctactcctctactccaaatttctcattcttcaggccaggaaaccgagacacagaggtaaagtaatttccccaaggtcacacagctggctggggcaggattgggtttacaacccacatctcctggctcttattccagggccttttcccactaagtagtattgccttccattaggctcctgagagttatttctcagggtcatgttgcatcttggagccacatgctgctgccctgatctcagtgggaaatccacccagcaacctaatacagccccttttccctgcattcacctggttcccatccacatgggttgcagatgtccttgaagagagtgaggcattgagggccaataggagcaatggggtccctggccttgtccatctgattcaggagatcactgctccatcgtgaggagccctctgaatagccccccactgaatgcttgccttgcccaaatggaatggaggaagattgattttctccatcagttcaccttgtgtcatctcataatggttggtctttccaggctgagggaaatgtttcttgtttccagagtagaaaaagaaagagtggaacaatagctttgttcatcctaactttctgagatggcttttcaacattttaaaaaaactagtgtggctaccattcactggcaatgatttcttttagaatatgggagtaagatgagctagagaaaataacctggtctcactgtggttgccctcatccacaatgtccccaaagccatcctgctctgatgaggacaatttccaggtataagcaaggggctttgtgacaaaaatgtaccctggctgatgttaaacattggctcctgtgtttgcaccaaaatagcaagctgtgtgctctatacactcttcccatcgtcttgtgtacactgctcctgtggccttccacagcagaaaccagggcaaaagggtccaaacacatggttttccttgctgcaaggctcttcctgggaactaagggggtatttattagttcagttctaagagacctccttctgggcttaccccactcctcaggtacttctctctccttcctccttctcctccacagtcacaagtaaccaaggaacctgaaagtggatgtgtagctatttgaagaaggcaaggaaccctgagattcttctttgaatcctctagtccaagtcttagaccagtgattggtgcttaccttgaacaaaattttgtctgtgttcctaatcccttcaatactctgggtacaatgctcccaatcaccctgcacatttgattctaaatggcttttattttttaaaaatccatatccctaggacaagagaacaggatgcctatatccccaaaatgagctccaggacactgatgggaatgatcccaaagatcaccccacctcagaaacgtctgtgccaagagacttccccagatagaaacactgggacagtggtttgaacgacttcttttatggttgtccagtttgctatggaaataaaaggcattgattttttaaaaagatgattggaacctgtctttggccacatagggccacttggatccatttccaggccttactcatatattgccttcactgaagggctttggctttaagtcccagactggtctcccaagtgaaccataagtgttttggagctcatctggggtgaggcatgagaatgttgccccatctatcccttcaggaaaaggtgccttccctccctttctcctaaagcctggtccccagaaattgtttttgtctccaaaagtctagtatggtctttatacacccagactcttagtgttgcgtcctgccttgtttccttgttaaggatctatgcagacctcccgctttggcttagctagcgtgacattggctatcatttgacaagactaacttttttttttttttttttttgactgagtctccctctgtcacctaggctggagtgcagtggcacaatcttggctcgctgcaaccttcacccttcacctcccaggtcgaagcgattctcctgcctcagtctcccgagtagctgggattacaggcgtgcgccaccaaatctggctatttttttattattattatttttagtagagatggggtttcaccatgttggccagactggtcttgaactcttggcctcaaattatctgcccacctcggcctcccaaagtgctgggattacaggcatgagccaccatgcccagctgacaagactaattttttatcccttggtttattggcttcaacatcttctggaatcagaggtgattttttcttaccttggatgcctgagactaggggagtatagaattccaattggtaattaaggcatctttctgctcctgatcagaagggcaggttagttgggagaggtcagatggcacaacagaagtcaccttgtaagtaaggcaaagacttgaaggcattagcgtttctcattactaggtcaataacctgagggaatcaatggctttttgccgctctacctcttgtgtatctctttgacttttctttctctgtctagtttcctctgttctcagtttatattctatgttatcagtctctctttccacagtacaaacatccatcctttctcctgtgcaattctgtctctccctcttattatctttatttgtactttttccttcctccctgtctaggcattgggcatgtgcctcttcttagcctgtgattttgccttgggactgatgataaattatttccagattcaatcagccctggtcctaccccagtccaatcagaagtatgttggtgggaatcaacctgatcctggccctttcttcttctccattttcattcgtaatccccctcagcagatctttacaagcagtttccttatagctcatgtatctttaggtctttgccttccaagcactgtacagaatactttgtggttcctttttagtctgacattttgtggagcagtgaagcgtgctcagagacataatcagctgaagagaaaaaatccacccatggatttatatcagctaaatactaataattgattttgtttgatgtgcccataatttttaaagctgcaatataatataatgagggaccacaggtaatttctcctgtcatttgttttggctggatgggggtgggggagtaattgcttaaagttttaccattacacattaaactctctataataatcttgtttggggcttgctaactgttgagctgttttaactaaactggtaggcaatcggagttgatttaaatgaaaagataatttaacaaatctatactataaaaagagacatttgcttaattgacatgtattttttccttctgagtcacctaaacatttactcttgacaccaactgttcatgatactgaatagacagtccatataagagaaattagtggacctaaagaagccagattgtaggtgttaatttattaaacagagtgcaaagcccttggaaatgtcactgcttggcaataccatatggaatgccaaaatttacaatgacttttctttataagttatccaaaagggatttgaacaagtaagaggttatgccaaaatgtctccaatgtatggtcctgtaatatattgcagcttgaagccaatgatcccttatgacttgtatacaactaatgcatgttttattgaattttgcatttcccacgtgtggtaagttctttaaaatgtttttgatcacctttttgtgccattaaacttgtacagaaaatgtttttatggccattttcaaagggagaaagtttaaaatggaaacagcccaccctttctgccctatagctgtagttagaattgagtacctgtagcaaaacagctgtaattggtggttgtagtgttagaggtgttagcttgctagtgactagctttggagagtaaatgcatggtattgtacatcacatttcttaactcgttttaacctctgaaaagaatatattcttctttgtagtccttcttcccacccccttgccctctccctctccctgctcccagttgtcttacagttgtaaatatctgatttgaggcccaataactcttgccaagtaaagtcagcaaacaacaaacaaaccaaaatgtggggaaaaggcatttctcaaccatctctcagcagttattgatcatttcttaaggaacagcattgtgatcaaagactcaactttacgtaaaaatcagtggtaaattggggttgtatttggccatttgattacatttcaggattgaatagttttcagaatcacatgtaatccaaagacagtaggtagtgatgtcccttatccctgcagctgttttaagatagagacctcagaagactctgcttgaccgatgaccaataattatttgaaaaaaaaagaaaaaatgagagaaataaaacagatatttaagaactttagccacctatttagaatagttatagccagaaaaaaaaacaagggcatgagttcaaatgcattactatcagtgtcctaggcaatacctaacctactctgaaattgtgattcaaaagcagtatttcaagaggcattctccttttttggtttgctgaccccacttggactggtaggtttggtgaggcccccataaaccagctggagcagacccttttcatctcctgtgcctgtaacacccctcttcccccaccccctccgcaattcaatgagggctttcttgggtcagaggacttcaaggttgtctagagaagtttgccatgtgtgtaaggtgctgtgaactgtgagtgctgaagattcgcagcattcaataccaggcagccaaagagctgctcttgcaattattttggctctcaagctctgttcttcatcgcattctcatttctgtgtacatttgcaagatgtgtgtaatgtcattttccaaaaataaaatttgatttcaata

SEQ ID NO: 10620 - protein, 360 aa, Homo sapiens; identical to SEQ ID NO: 1354

SEQ ID NO: 10621 - DNA, 9108 bp, Homo sapiens
ctggcaggaatttcttgcttggagctcagacaacaaaggcatagagagattggttttctttctctcagcatctccacccaaccagcagaaaaccggtctctgaggttccaccaaaatatggaacttgattttggacactttgacgaaagagataagacatccaggaacatgcgaggctcccggatgaatgggttgcctagccccactcacagcgcccactgtagcttctaccgaaccagaaccttgcaggcactgagtaatgagaagaaagccaagaaggtacgtttctaccgcaatggggaccgctacttcaaggggattgtgtacgctgtgtcctctgaccgttttcgcagctttgacgccttgctggctgacctgacgcgatctctgtctgacaacatcaacctgcctcagggagtgcgttacatttacaccattgatggatccaggaagatcggaagcatggatgaactggaggaaggggaaagctatgtctgttcctcagacaacttctttaaaaaggtggagtacaccaagaatgtcaatcccaactggtctgtcaacgtaaaaacatctgccaatatgaaagccccccagtccttggctagcagcaacagtgcacaggccagggagaacaaggactttgtgcgccccaagctggttaccatcatccgcagtggggtgaagcctcggaaggctgtgcgtgtgcttctgaacaagaagacagcccactcttttgagcaagtcctcactgatatcacagaagccatcaaactggagaccggggttgtcaaaaaactctacactctggatggaaaacaggtaacttgtctccatgatttctttggtgatgatgatgtgtttattgcctgtggtcctgaaaaatttcgctatgctcaggatgatttttctctggatgaaaatgaatgccgagtcatgaagggaaacccatcagccacagctggcccaaaggcatccccaacacctcagaagacttcagccaagagccctggtcctatgcgccgaagcaagtctccagctgactcagcaaacggaacctccagcagccagctctctacccccaagtctaagcagtctcccatctctacgcccaccagtcctggcagcctccggaagcacaaggacctgtacctgcctctgtccttggatgactcggactcgcttggtgattccatgtaaaggaggggagagtgctcagagtccagagtacaaatccaagcctatcattgtagtagggtacttctgctcaagtgtccaacagggctattggtgctttcaagtttttattttgttgttgttgttattttgaaaaacacattgtaatatgttgggtttattttcctgtgatttctcctctgggccactgatccacagttaccaattatgagagatagattgataaccatcctttggggcagcattccagggatgcaaaatgtgctagtccatgacctttcaatggaaagcttaggtgcctgcgttatatttgccctgtctaattttgcccatacagtcttccttctgtagagggctgtttacatatacagcacttaaaatgtttgtgtgggaaaaaaaaaactcattggcagatccaagaatgacaaacacaagtgccccttttctctggatctcaagaatggtggaggaccctggaaggacagcaaggcagctccccagcctcactcttcactcctgattgaggcccgggtttgttgtccagcaccaattctggctgtcaatggggagaaataaaccaacaacttataattgtgacaccagatgcttaggatcctggtgctgggttagctaagagaatagacagaattggaaaatactgcagacatttccgaagagtttataaagcacagtgaattcctggtcaatctctccactgaggcaatttggaatcaataagcaattgataatagtttggagtaagggacttcatatacctgattcctctagaaggctgtctaacataccacatgattacatgaactgtatggtatccatctatctctgttctattgaatgccttgttaacagccaacactgaaaacactgtgagaatttgttttcaggtctgacacctttcagtctctttttatagcaagaaatcaatatcctttttataaaaattcatgtctgtatttcaggagcaaactcttcaggctccttttttataaactggtgatttttcttttgtctaaaaaacacatgaagaaaatttaccaaaaaaaaaaaaaaaagcagaagaataatgtagtttagaaattatgctgtcactgccaaacagtaacctccaggagaaaacaagatgaatagcagaggccaattcaatagaatcagttttttgatagctttttaacagttatgcttgcattaataatttcaatgtggaccagacattctaattatattttaaatgaaatgttacagcatattttaagcaactctttttatctataatcctaatatttcatactgaagacacagaaatctttcacttgtctttaacattagaaaggatttctctttactaaggactgatcatttgaaatagttttcagtcttttgagatacaggtttataacactgcttttttttttctgtaatcatagcccataatggcaaagacaactaaatttaagtgaaggtcatgcatgccaattctgtgtttgcttttagcagatatgaagatttccttatttctttgtaattgtgcagatattttgaaaggcacagcattcgaagccaagctgctgtttggctactgaatggcttgcagttgttcctccactctaaatggaatgagcttgctgtgtgtgtgtgtggtggtggtgggagggggtggtgcatgtgtgtgtgtgtgtgtgcatctgcagctgcttcaaaattaggaaatactacaggacacccctgtaatggattggtggcaactgggtggcactgctgatgtgcactgtgtaggggggaacccagtggtggtggggtagctcagatgcccctagacaagcttcagatgtctgtagctaccagaaacattttcggttcaggaaaagtgagatgatggtagtactggtttctggtgaaattgaagaaccccaaatgatgaggatctctttttgccccctctcctttttttgtagacccattcaaaaccattaataagcccattttactaagcccctatttctttctagaagctcagggttttcttagtgcctcccagaacattttgtagttaattgggaaaaagtgatacttggattagggggtgtgggcataaagaatggtgggaggcctgattttaaacttcaggccagaacccccaatgactccacccatagtctcactttaggtctcatttagtccatcacctttattttaagttgaggaagtggaggctggtaaagagcaggaccagaggaagaatccagatttccttatgcttgggcctcacactagctctctgagtatttccttgattgcggtatatgtactactagaaaataccaaatggatatattttctttaggataacctttgaaccaacaatcttcaataacaatagtacatcttccatcttacttttaatcgagtataaggaaatgtttctttatggccattttggagggagcaggggatgaggcttggcatagtccaaaatttaagtctccaataattaattgcattttaaattggcccactttcaaggcaattttttttgtgtgtctgtaactgagctcctccacccctgtcattcacttccaattttacccaatccaattttagcactcaagttccattgtgttaatttctgcacggtcaacaaacatcaagtcagcaagcatttgccaccactccctatacttctccctccttcttacacacacacacacacacacacacacaatccatctcttgcttgttcctacctcctgatttttcttccctacagaaatagaaatagggacaaagaaggggaaaatgtatatattggggctgggctgaacaactaacttcataagtagtattaactaggggtaaattgagagaaaagctccttttctcttcactgttttggaaaggatagccattagcatgactgctttgtgtccttatggactttagtattagcctagattgaattatagcgttttctagctggaaggaaccttaagatcacatcatctactcctctactccaaatttctcattcttcaggccaggaaaccgagacacagaggtaaagtaatttccccaaggtcacacagctggctggggcaggattgggtttacaacccacatctcctggctcttattccagggccttttcccactaagtagtattgccttccattaggctcctgagagttatttctcagggtcatgttgcatcttggagccacatgctgctgccctgatctcagtgggaaatccacccagcaacctaatacagccccttttccctgcattcacctggttcccatccacatgggttgcagatgtccttgaagagagtgaggcattgagggccaataggagcaatggggtccctggccttgtccatctgattcaggagatcactgctccatcgtgaggagccctctgaatagccccccactgaatgcttgccttgcccaaatggaatggaggaagattgattttctccatcagttcaccttgtgtcatctcataatggttggtctttccaggctgagggaaatgtttcttgtttccagagtagaaaaagaaagagtggaacaatagctttgttcatcctaactttctgagatggcttttcaacattttaaaaaaactagtgtggctaccattcactggcaatgatttcttttagaatatgggagtaagatgagctagagaaaataacctggtctcactgtggttgccctcatccacaatgtccccaaagccatcctgctctgatgaggacaatttccaggtataagcaaggggctttgtgacaaaaatgtaccctggctgatgttaaacattggctcctgtgtttgcaccaaaatagcaagctgtgtgctctatacactcttcccatcgtcttgtgtacactgctcctgtggccttccacagcagaaaccagggcaaaagggtccaaacacatggttttccttgctgcaaggctcttcctgggaactaagggggtatttattagttcagttctaagagacctccttctgggcttaccccactcctcaggtacttctctctccttcctccttctcctccacagtcacaagtaaccaaggaacctgaaagtggatgtgtagctatttgaagaaggcaaggaaccctgagattcttctttgaatcctctagtccaagtcttagaccagtgattggtgcttaccttgaacaaaattttgtctgtgttcctaatcccttcaatactctgggtacaatgctcccaatcaccctgcacatttgattctaaatggcttttattttttaaaaatccatatccctaggacaagagaacaggatgcctatatccccaaaatgagctccaggacactgatgggaatgatcccaaagatcaccccacctcagaaacgtctgtgccaagagacttccccagatagaaacactgggacagtggtttgaacgacttcttttatggttgtccagtttgctatggaaataaaaggcattgattttttaaaaagatgattggaacctgtctttggccacatagggccacttggatccatttccaggccttactcatatattgccttcactgaagggctttggctttaagtcccagactggtctcccaagtgaaccataagtgttttggagctcatctggggtgaggcatgagaatgttgccccatctatcccttcaggaaaaggtgccttccctccctttctcctaaagcctggtccccagaaattgtttttgtctccaaaagtctagtatggtctttatacacccagactcttagtgttgcgtcctgccttgtttccttgttaaggatctatgcagacctcccgctttggcttagctagcgtgacattggctatcatttgacaagactaacttttttttttttttttttttgactgagtctccctctgtcacctaggctggagtgcagtggcacaatcttggctcgctgcaaccttcacccttcacctcccaggtcgaagcgattctcctgcctcagtctcccgagtagctgggattacaggcgtgcgccaccaaatctggctatttttttattattattatttttagtagagatggggtttcaccatgttggccagactggtcttgaactcttggcctcaaattatctgcccacctcggcctcccaaagtgctgggattacaggcatgagccaccatgcccagctgacaagactaattttttatcccttggtttattggcttcaacatcttctggaatcagaggtgattttttcttaccttggatgcctgagactaggggagtatagaattccaattggtaattaaggcatctttctgctcctgatcagaagggcaggttagttgggagaggtcagatggcacaacagaagtcaccttgtaagtaaggcaaagacttgaaggcattagcgtttctcattactaggtcaataacctgagggaatcaatggctttttgccgctctacctcttgtgtatctctttgacttttctttctctgtctagtttcctctgttctcagtttatattctatgttatcagtctctctttccacagtacaaacatccatcctttctcctgtgcaattctgtctctccctcttattatctttatttgtactttttccttcctccctgtctaggcattgggcatgtgcctcttcttagcctgtgattttgccttgggactgatgataaattatttccagattcaatcagccctggtcctaccccagtccaatcagaagtatgttggtgggaatcaacctgatcctggccctttcttcttctccattttcattcgtaatccccctcagcagatctttacaagcagtttccttatagctcatgtatctttaggtctttgccttccaagcactgtacagaatactttgtggttcctttttagtctgacattttgtggagcagtgaagcgtgctcagagacataatcagctgaagagaaaaaatccacccatggatttatatcagctaaatactaataattgattttgtttgatgtgcccataatttttaaagctgcaatataatataatgagggaccacaggtaatttctcctgtcatttgttttggctggatgggggtgggggagtaattgcttaaagttttaccattacacattaaactctctataataatcttgtttggggcttgctaactgttgagctgttttaactaaactggtaggcaatcggagttgatttaaatgaaaagataatttaacaaatctatactataaaaagagacatttgcttaattgacatgtattttttccttctgagtcacctaaacatttactcttgacaccaactgttcatgatactgaatagacagtccatataagagaaattagtggacctaaagaagccagattgtaggtgttaatttattaaacagagtgcaaagcccttggaaatgtcactgcttggcaataccatatggaatgccaaaatttacaatgacttttctttataagttatccaaaagggatttgaacaagtaagaggttatgccaaaatgtctccaatgtatggtcctgtaatatattgcagcttgaagccaatgatcccttatgacttgtatacaactaatgcatgttttattgaattttgcatttcccacgtgtggtaagttctttaaaatgtttttgatcacctttttgtgccattaaacttgtacagaaaatgtttttatggccattttcaaagggagaaagtttaaaatggaaacagcccaccctttctgccctatagctgtagttagaattgagtacctgtagcaaaacagctgtaattggtggttgtagtgttagaggtgttagcttgctagtgactagctttggagagtaaatgcatggtattgtacatcacatttcttaactcgttttaacctctgaaaagaatatattcttctttgtagtccttcttcccacccccttgccctctccctctccctgctcccagttgtcttacagttgtaaatatctgatttgaggcccaataactcttgccaagtaaagtcagcaaacaacaaacaaaccaaaatgtggggaaaaggcatttctcaaccatctctcagcagttattgatcatttcttaaggaacagcattgtgatcaaagactcaactttacgtaaaaatcagtggtaaattggggttgtatttggccatttgattacatttcaggattgaatagttttcagaatcacatgtaatccaaagacagtaggtagtgatgtcccttatccctgcagctgttttaagatagagacctcagaagactctgcttgaccgatgaccaataattatttgaaaaaaaaagaaaaaatgagagaaataaaacagatatttaagaactttagccacctatttagaatagttatagccagaaaaaaaaacaagggcatgagttcaaatgcattactatcagtgtcctaggcaatacctaacctactctgaaattgtgattcaaaagcagtatttcaagaggcattctccttttttggtttgctgaccccacttggactggtaggtttggtgaggcccccataaaccagctggagcagacccttttcatctcctgtgcctgtaacacccctcttcccccaccccctccgcaattcaatgagggctttcttgggtcagaggacttcaaggttgtctagagaagtttgccatgtgtgtaaggtgctgtgaactgtgagtgctgaagattcgcagcattcaataccaggcagccaaagagctgctcttgcaattattttggctctcaagctctgttcttcatcgcattctcatttctgtgtacatttgcaagatgtgtgtaatgtcattttccaaaaataaaatttgatttcaata

SEQ ID NO: 10622 - protein, 360 aa, Homo sapiens; identical to SEQ ID NO: 1354

SEQ ID NO: 10623 - DNA, 2254 bp, Homo sapiens
ctggcaggaatttcttgcttggagctcagacaacaaaggcatagagagattggttttctttctctcagcatctccacccaaccagcagaaaaccggtctctgaggttccaccaaaatatggaacttgattttggacactttgacgaaagagataagacatccaggaacatgcgaggctcccggatgaatgggttgcctagccccactcacagcgcccactgtagcttctaccgaaccagaaccttgcaggcactgagtaatgagaagaaagccaagaaggtacgtttctaccgcaatggggaccgctacttcaaggggattgtgtacgctgtgtcctctgaccgttttcgcagctttgacgccttgctggctgacctgacgcgatctctgtctgacaacatcaacctgcctcagggagtgcgttacatttacaccattgatggatccaggaagatcggaagcatggatgaactggaggaaggggaaagctatgtctgttcctcagacaacttctttaaaaaggtggagtacaccaagaatgtcaatcccaactggtctgtcaacgtaaaaacatctgccaatatgaaagccccccagtccttggctagcagcaacagtgcacaggccagggagaacaaggactttgtgcgccccaagctggttaccatcatccgcagtggggtgaagcctcggaaggctgtgcgtgtgcttctgaacaagaagacagcccactcttttgagcaagtcctcactgatatcacagaagccatcaaactggagaccggggttgtcaaaaaactctacactctggatggaaaacaggtaacttgtctccatgatttctttggtgatgatgatgtgtttattgcctgtggtcctgaaaaatttcgctatgctcaggatgatttttctctggatgaaaatgaatgccgagtcatgaagggaaacccatcagccacagctggcccaaaggcatccccaacacctcagaagacttcagccaagagccctggtcctatgcgccgaagcaagtctccagctgactcagcaaacggaacctccagcagccagctctctacccccaagtctaagcagtctcccatctctacgcccaccagtcctggcagcctccggaagcacaaggacctgtacctgcctctgtccttggatgactcggactcgcttggtgattccatgtaaaggaggggagagtgctcagagtccagagtacaaatccaagcctatcattgtagtagggtacttctgctcaagtgtccaacagggctattggtgctttcaagtttttattttgttgttgttgttattttgaaaaacacattgtaatatgttgggtttattttcctgtgatttctcctctgggccactgatccacagttaccaattatgagagatagattgataaccatcctttggggcagcattccagggatgcaaaatgtgctagtccatgacctttcaatggaaagcttaggtgcctgcgttatatttgccctgtctaattttgcccatacagtcttccttctgtagagggctgtttacatatacagcacttaaaatgtttgtgtgggaaaaaaaaaactcattggcagatccaagaatgacaaacacaagtgccccttttctctggatctcaagaatggtggaggaccctggaaggacagcaaggcagctccccagcctcactcttcactcctgattgaggcccgggtttgttgtccagcaccaattctggctgtcaatggggagaaataaaccaacaacttataattgtgacaccagatgcttaggatcctggtgctgggttagctaagagaatagacagaattggaaaatactgcagacatttccgaagagtttataaagcacagtgaattcctggtcaatctctccactgaggcaatttggaatcaataagcaattgataatagtttggagtaagggacttcatatacctgattcctctagaaggctgtctaacataccacatgattacatgaactgtatggtatccatctatctctgttctattgaatgccttgttaacagccaacactgaaaacactgtgagaatttgttttcaggtctgacacctttcagtctctttttatagcaagaaatcaatatcctttttataaaaattcatgtctgtatttcaggagcaaactcttcaggctccttttttataaactggtgatttttcttttgtctaaaaaacacatgaagaaaatttacc

SEQ ID NO: 10624 - protein, 360 aa, Homo sapiens; identical to SEQ ID NO: 1354

SEQ ID NO: 10625 - DNA, 639 bp, Homo sapiens
cgggaagctgtgcaacatcgccttggagccacataaaaagctatgcgagaggccggagacatcctgagagaatacaaactgtcagatgggaatgtcatccacattggggaccaactgtatcaagtgcccgaagttctttttgcccctgaccagctgggaatccacagcccgggactctcaataatggcctccagcaacataatgaactgtgacactgacatccagaagaaagtttttgcagagattgtactgtctgggggcaccactctcttttctgggccagaggaaaggctcatgaaagaactggaacagctagcttccaaagggaacaatcggagaaactggttgttttacggaggctttgactggaatggtgtcctttcctttaaggaatcaaacttaacttacggatccaacaaaagccccttgagaaaactggactcatacttgtctacgcagtctctgaacagagttcctgacctgtgagatctggaacaaaatctacaatatctccaagaatgtataaaacagaattgcagtctgaccacttcaagaccactactctaggctttttgggtttgttttctccctggaccatggtcactcatattggctcagaataaacttctttgaaatact

SEQ ID NO: 10626 - protein, 147 aa, Homo sapiens
MREAGDILREYKLSDGNVIHIGDQLYQVPEVLFAPDQLGIHSPGLSIMASSNIMNCDTDIQKKVFAEIVLSGGTTLFSGPEERLMKELEQLASKGNNRRNWLFYGGFDWNGVLSFKESNLTYGSNKSPLRKLDSYLSTQSLNRVPDL

SEQ ID NO: 10627 - DNA, 1435 bp, Homo sapiens
ggagataagattcagaggttgaggatggggtgtcctggtggactgaaggtagcctactagctgtacatgggtgacaacttgaaacttcagaaccctgaagtttaaaaaattctaaaggtgcctgtcatctcagagagtgacgtaagtgttctttctttatttgggggaagtccaggagaacatattacagacatgtttaatccacatgcattagatgttcctgctgtaatttttgacaatggttcaggactctgcaaagcaggcctgtctggagagattggaccccgccatgtcatcagctccgtcttgggacattgtaaattcaatgtgcctttagcaagacttaatcagaagtacttcgtggggcaagaagccctgtacaagtatgaggccctacatttgcactaccccattgagcgtggactggtaacaggatgggatgacatggagaaactctggaaacatctctttgagcgggagcttggagtaaaacccagccaacagcctgtacttatgaccgagccctctttgaatcctagggaaattcgagaaaagctagcagaaatgatgtttgagaccttcagtgtgcctggtttctacctgtctaatcatgcggtggcagcgctctatgcctctgcctgtgtcacaggcctggtggtggacagtggagatggggtcacttgcactgtccccatctttgagggttactccctgcctcacgcagtcaccaaactctgtatggcagggagggacatcacagagcacctcacccggctcctctttgctagcgggtttaacttcccttgcatactcaacaaggccgtggtaaataacatcaaagagaagttgtgctacatcgccttggagccagagaaagagctacgcaagagccggggagaggtcctgggagcatacagactgccagatggacatgtcatccactttggggatgagctgtaccaagtgcccgaggttctttttgcacctgaccagctgggcatccacagcccaggactctcaaaaatggtctccagcagcatcatgaagtgtgacactgacatccagaataaactttatgcagacattgtactctccgggggcaccactctcctccctgggctggaggaaaggctcatgaaggaagtggaacagctggcttccaaaggtactcccatcaagatcacagcttctcctgatagatgcttctctgcatggattggtgcatccatcatgacctctatgagcagtttcaagcagatgtgggtcacctcggcagacttcaaggagtatgggacatctgtggttcaaagaaggtgcttttaaagatccttgagcagaggagacatcttgaagtgtcagattacaggagtaccagtgggagatggcattttcttctgggcttcagcatgatgttcaataaaagttttgccatttc

SEQ ID NO: 10628 - protein, 376 aa, Homo sapiens; identical to SEQ ID NO: 1360

SEQ ID NO: 10629 - DNA, 1056 bp, Homo sapiens
tatatcagaccatcagaaggatttgtataaagagtgactctcctatgaaggtaaaggccacccctcttcagttccagtgactgagatacatttttccaatcctgggggcaaatacagacacagcaagttccttcttccctttggaaatttggcagaaatcctcactggacggcttcctgtttcctgtggttcattatctgattggctgcagggatgaaagtttttaagttcataggactgatgatcctcctcacctctgcgttttcagccggttcaggacaaagtccaatgactgtgctgtgctccatagactggttcatggtcacagtgcaccccttcatgctaaacaacgatgtgtgtgtacactttcatgaactacacttgggcctgggttgccccccaaaccatgttcagccacacgcctaccagttcacctaccgtgttactgaatgtggcatcagggccaaagctgtctctcaggacatggttatctacagcactgagatacactactcttctaagggcacgccatctaagtttgtgatcccagtgtcatgtgctgccccccaaaagtccccatggctcaccaagccctgctccatgagagtagccagcaagagcagggccacagcccagaaggatgagaaatgctacgaggtgttcagcttgtcacagtccagtcaaaggcccaactgcgattgtccaccttgtgtcttcagtgaagaagagcatacccaggtcccttgtcaccaagcaggggctcaggaggctcaacctctgcagccatctcactttcttgatatttctgaggattggtctcttcacacagatgatatgattgggtccatgtgatcctcaggtttggggtctcctgaagatgctatttctagaattagtatatagtgtacaaatgtctgacaaataagtgctcttgtgaccctcatgtgagcacttttgagaaagagaaacctatagcaacttcatgaattaagcctttttctatatttttatattcatgtgtaaacaaaaaataaaataaaattctgatcgcataaa

SEQ ID NO: 10630 - protein, 212 aa, Homo sapiens; identical to SEQ ID NO: 1362

SEQ ID NO: 10631 - DNA, 1129 bp, Homo sapiens
atatatcagaccatcagaaggatttgtataaagagtgactctcctatgaaggtaaaggccacccctcttcagttccagtgactgagatacatttttccaatcctgggggcaaatacagacacagcaagttccttcttccctttggaaatttggcagctgccttcaccagtgagcacaaagccacatttcaaaggaaactgacaaattatccccagctgccagaagaagaaatcctcactggacggcttcctgtttcctgtggttcattatctgattggctgcagggatgaaagtttttaagttcataggactgatgatcctcctcacctctgcgttttcagccggttcaggacaaagtccaatgactgtgctgtgctccatagactggttcatggtcacagtgcaccccttcatgctaaacaacgatgtgtgtgtacactttcatgaactacacttgggcctgggttgccccccaaaccatgttcagccacacgcctaccagttcacctaccgtgttactgaatgtggcatcagggccaaagctgtctctcaggacatggttatctacagcactgagatacactactcttctaagggcacgccatctaagtttgtgatcccagtgtcatgtgctgccccccaaaagtccccatggctcaccaagccctgctccatgagagtagccagcaagagcagggccacagcccagaaggatgagaaatgctacgaggtgttcagcttgtcacagtccagtcaaaggcccaactgcgattgtccaccttgtgtcttcagtgaagaagagcatacccaggtcccttgtcaccaagcaggggctcaggaggctcaacctctgcagccatctcactttcttgatatttctgaggattggtctcttcacacagatgatatgattgggtccatgtgatcctcaggtttggggtctcctgaagatgctatttctagaattagtatatagtgtacaaatgtctgacaaataagtgctcttgtgaccctcatgtgagcacttttgagaaagagaaacctatagcaacttcatgaattaagcctttttctatatttttatattcatgtgtaaacaaaaaataaaataaaattctgatcgcataaa

SEQ ID NO: 10632 - protein, 212 aa, Homo sapiens; identical to SEQ ID NO: 1362

SEQ ID NO: 10633 - DNA, 949 bp, Homo sapiens
cttctctctcctgccaccacatgaagaaagacatgtttgcttccccttccgccatgagtgtaagtttcctgaggcctccccagccatgtggaactggacatggtcacccaggctggagcacggtggtgcaatcacagctcactgcagcctcaaacttcaaaggatcctcacatctcagcctgctgagtagggcctctcagcttgtggcatgattcactgaaatacatcaaacatgacagaagatgcaagcatttggaaacttacatcagccatcatcaaattaaaaagctaaaaagtgctatcagctggcttgctcatcattgagtgacctgaagtgatggatgatggagaggaggttgctgtgagggtagaggtggctcagtaccctgcaggagcaatgcaaagagagactgtgcccaagaccatctccccgggggggatgggtggcattcctgccttccttccaccaacaaatgttgactgtgccatgcactgggatgacagagatgactcagatgtgcccttgtcctcaatgtgttcatggttggatgaggagaacaccagtcttactctagtgactgaaggctaagacaaagactccagcctcaaacttgaggaaggaagttcatgtttcttcctgggttggccaatagaaagtggtatttgtggccgggcatggtggctcacgcttgtaatcccagcactttgggaagccgaggcgggtggatcacgaggtcaagagatcaagaccatcctggccaatatggtgaaaccctgtctctactagagatacaaaaaaattagctgggtgtggtggcatgcacctgtagtcccagctactcaggaggctgaggcaggagaatcgcttgatcctgggaggcggaggctgcagtgagccaaaatcgcaccactgcactccagcccgggtgacagagtgagactccatctc

SEQ ID NO: 10634 - protein, 63 aa, Homo sapiens [sequence omitted]

SEQ ID NO: 10635 - RNA, 98 nt, Homo sapiens
  misc_RNA: miRNA sequence.
cauauuagguuaaugcaaaaguaaucgcgguuugugccagaugacgauuugaauuaauaaauucauuugguauaaaccgcgauuauuuuugcaucaac

SEQ ID NO: 10636 - RNA, 72 nt, Homo sapiens
  misc_RNA: miRNA sequence.
agauacuguaaacauccuacacucucagcuguggaaaguaagaaagcugggagaaggcuguuuacucuuucu

SEQ ID NO: 10637 - RNA, 97 nt, Homo sapiens
  misc_RNA: miRNA sequence.
uagccagucagaaaugagcuuauucauaaaagugcaguauggugaagucaaucuguaauuuuauguauaagcuagucucugauugaaacaugcagca

SEQ ID NO: 10638 - RNA, 97 nt, Homo sapiens
  misc_RNA: miRNA sequence.
gauugaugcuguugguuuggugcaaaaguaauugcagugcuucccauuuaaaaguaauggcacacacugcaauuacuuuugcuccaacuuaauacuu

SEQ ID NO: 10639 - RNA, 76 nt, Homo sapiens
  misc_RNA: miRNA sequence.
gagggggaagacgggaggaaagaagggagugguuccaucacgccuccucacuccucuccucccgucuucuccucuc

SEQ ID NO: 10640 - RNA, 90 nt, Homo sapiens
  misc_RNA: miRNA sequence.
ggaggcccguuucucucuuugguuaucuagcuguaugagugccacagagccgucauaaagcuagauaaccgaaaguagaaaugauucuca

SEQ ID NO: 10641 - RNA, 79 nt, Homo sapiens
  misc_RNA: miRNA sequence.
agccucgucaggcucaguccccucccgauaaaccccuaaauagggacuuucccggggggugacccuggcuuuuuuggcg

SEQ ID NO: 10642 - DNA, 21 bp, Homo sapiens
gtttatcttcrgacaacaggc

SEQ ID NO: 10643 - DNA, 21 bp, Homo sapiens
ccctgggcatwcggagatgta

SEQ ID NO: 10644 - DNA, 21 bp, Homo sapiens
ccgggcgggcrttgccgacgg

SEQ ID NO: 10645 - DNA, 21 bp, Homo sapiens
cctgcaattayaggtcagtcc

SEQ ID NO: 10646 - DNA, 21 bp, Homo sapiens
ggctgccctcrttgagccatt

SEQ ID NO: 10647 - DNA, 21 bp, Homo sapiens
cccttagtgcrtgctgaatat

SEQ ID NO: 10648 - DNA, 21 bp, Homo sapiens
tcgtccatgtrgaggaagagg

SEQ ID NO: 10649 - DNA, 21 bp, Homo sapiens
gctctcacagyagttcctatt

SEQ ID NO: 10650 - DNA, 21 bp, Homo sapiens
gattgagatcyggaccgattc

SEQ ID NO: 10651 - DNA, 21 bp, Homo sapiens
agactattatyatctttagca

SEQ ID NO: 10652 - DNA, 21 bp, Homo sapiens
cccaaagcaawatcaagcagg

SEQ ID NO: 10653 - DNA, 21 bp, Homo sapiens
aggaggagatktggggtctct

SEQ ID NO: 10654 - DNA, 21 bp, Homo sapiens
caatgtgaacsggaaaggaaa

SEQ ID NO: 10655 - DNA, 21 bp, Homo sapiens
gaattacactkagatttttct

SEQ ID NO: 10656 - DNA, 21 bp, Homo sapiens
tcatgatgggscctgtttcac

SEQ ID NO: 10657 - DNA, 21 bp, Homo sapiens
cgtttgcgggsaagtccctct

SEQ ID NO: 10658 - DNA, 21 bp, Homo sapiens
atacacaataygagctatgtg

SEQ ID NO: 10659 - DNA, 21 bp, Homo sapiens
agcattagctyggtcaggttt

SEQ ID NO: 10660 - DNA, 21 bp, Homo sapiens
gcctggccttygagagactct

SEQ ID NO: 10661 - DNA, 21 bp, Homo sapiens
gtgaagagagrgagcacacgg

SEQ ID NO: 10662 - DNA, 21 bp, Homo sapiens
ggttgaggctragcaaaacag

SEQ ID NO: 10663 - DNA, 21 bp, Homo sapiens
ggtgccagggwctttcctaca

SEQ ID NO: 10664 - DNA, 21 bp, Homo sapiens
aaccaaggccrtgtagtagaa

SEQ ID NO: 10665 - DNA, 21 bp, Homo sapiens
actcaaatctyctgtcattgg

SEQ ID NO: 10666 - DNA, 21 bp, Homo sapiens
tttttaaaaasacggcctgga

SEQ ID NO: 10667 - DNA, 21 bp, Homo sapiens
cttgtgttttsatgtgatcac

SEQ ID NO: 10668 - DNA, 21 bp, Homo sapiens
tccgctacctkgcagtgtttg

SEQ ID NO: 10669 - DNA, 21 bp, Homo sapiens
aatacttctayagtagagcaa

SEQ ID NO: 10670 - DNA, 21 bp, Homo sapiens
gtttattttcytgtcaaagtt

SEQ ID NO: 10671 - DNA, 21 bp, Homo sapiens
ttataacagcrgttcatatat

SEQ ID NO: 10672 - DNA, 21 bp, Homo sapiens
gaagactaaartgtttgaaat

SEQ ID NO: 10673 - DNA, 21 bp, Homo sapiens
ctgcagcctasagagcaagcc

SEQ ID NO: 10674 - DNA, 21 bp, Homo sapiens
tcaatttaacrgcactgcaac

SEQ ID NO: 10675 - DNA, 21 bp, Homo sapiens
tgtaacgtgtrtaataccttg

SEQ ID NO: 10676 - DNA, 21 bp, Homo sapiens
gctggaagacwggaggctcat

SEQ ID NO: 10677 - DNA, 21 bp, Homo sapiens
gttactcagarcacagcttaa

SEQ ID NO: 10678 - DNA, 21 bp, Homo sapiens
agaactgtggrttatgtgtcc

SEQ ID NO: 10679 - DNA, 21 bp, Homo sapiens
ctttaaaaagytgttctaagg

SEQ ID NO: 10680 - DNA, 21 bp, Homo sapiens
gttcagtgaayattaatttgc

SEQ ID NO: 10681 - DNA, 21 bp, Homo sapiens
tctcaagagastacagtccat

SEQ ID NO: 10682 - DNA, 21 bp, Homo sapiens
taccagtgacrtaggaaaaag

SEQ ID NO: 10683 - DNA, 21 bp, Homo sapiens
tgtgcagatawccctgttcaa

SEQ ID NO: 10684 - DNA, 21 bp, Homo sapiens
aagtagagcaracagacatta

SEQ ID NO: 10685 - DNA, 21 bp, Homo sapiens
aatacaatacmtagttcagta

SEQ ID NO: 10686 - DNA, 21 bp, Homo sapiens
aagccaaagaygactttacga

SEQ ID NO: 10687 - DNA, 21 bp, Homo sapiens
gggttaaagamtttgctgttg

SEQ ID NO: 10688 - DNA, 21 bp, Homo sapiens
caattgcgctrttacaaccta

SEQ ID NO: 10689 - DNA, 21 bp, Homo sapiens
cttagttgaaraacacctccc

SEQ ID NO: 10690 - DNA, 21 bp, Homo sapiens
cagtttatagwcacattcaaa

SEQ ID NO: 10691 - DNA, 21 bp, Homo sapiens
ctgcaggaacwgttgctgtca

SEQ ID NO: 10692 - DNA, 21 bp, Homo sapiens
accaccaagamgaggacatag

SEQ ID NO: 10693 - DNA, 21 bp, Homo sapiens
atgttcactgrgaagcctcct

SEQ ID NO: 10694 - DNA, 21 bp, Homo sapiens
tagctcatggytcttcactca

SEQ ID NO: 10695 - DNA, 21 bp, Homo sapiens
ttcaaaatgcrtaaccacacc

SEQ ID NO: 10696 - DNA, 21 bp, Homo sapiens
tggaaacctcrccaacgcccc

SEQ ID NO: 10697 - DNA, 21 bp, Homo sapiens
gcctgactaayggctgcttag

SEQ ID NO: 10698 - DNA, 21 bp, Homo sapiens
taccgctgagrgtctccttcc

SEQ ID NO: 10699 - DNA, 21 bp, Homo sapiens
gtgtcccttcraccagaacaa

SEQ ID NO: 10700 - DNA, 21 bp, Homo sapiens
tccaaagaccrtatccccaaa

SEQ ID NO: 10701 - DNA, 21 bp, Homo sapiens
atttaacccaytcctgatata

SEQ ID NO: 10702 - DNA, 21 bp, Homo sapiens
aaaaaagactstagaactgca

SEQ ID NO: 10703 - DNA, 21 bp, Homo sapiens
ttccagttttygaacatacct

SEQ ID NO: 10704 - DNA, 21 bp, Homo sapiens
agctgacagtyggttgatccc

SEQ ID NO: 10705 - DNA, 21 bp, Homo sapiens
ttatccagctstttattagaa

SEQ ID NO: 10706 - DNA, 21 bp, Homo sapiens
caggttactgyggtgtgtgga

SEQ ID NO: 10707 - DNA, 21 bp, Homo sapiens
gacctatcacrgaccaaggac

SEQ ID NO: 10708 - DNA, 21 bp, Homo sapiens
aagagagggaraggtagttgc

SEQ ID NO: 10709 - DNA, 21 bp, Homo sapiens
acatgcaaggsgctatgatca

SEQ ID NO: 10710 - DNA, 21 bp, Homo sapiens
tgcttgtaccyagagctctga

SEQ ID NO: 10711 - DNA, 21 bp, Homo sapiens
agtgcaaggtkgattaacaca

SEQ ID NO: 10712 - DNA, 21 bp, Homo sapiens
tattctaggcmaacagaatag

SEQ ID NO: 10713 - DNA, 21 bp, Homo sapiens
tgaaaagcacrggatgagaca

SEQ ID NO: 10714 - DNA, 21 bp, Homo sapiens
gagtcgatacraagggtgaga

SEQ ID NO: 10715 - DNA, 21 bp, Homo sapiens
ttgccagcacrataactgaga

SEQ ID NO: 10716 - DNA, 21 bp, Homo sapiens
gaaagcatgasattgttactg

SEQ ID NO: 10717 - DNA, 21 bp, Homo sapiens
gtggtggagarcagcatcaca

SEQ ID NO: 10718 - DNA, 21 bp, Homo sapiens
aagagacttayatagtttagc

SEQ ID NO: 10719 - DNA, 21 bp, Homo sapiens
tttgcatttgktcttcaggac

SEQ ID NO: 10720 - DNA, 21 bp, Homo sapiens
aaggccttaargaacccactt

SEQ ID NO: 10721 - DNA, 21 bp, Homo sapiens
tgctccagacmgtagaaattg

SEQ ID NO: 10722 - DNA, 21 bp, Homo sapiens
ctaaggtcatrcatgatttaa

SEQ ID NO: 10723 - DNA, 21 bp, Homo sapiens
aagaacaaacmgtctagagaa

SEQ ID NO: 10724 - DNA, 21 bp, Homo sapiens
actctgtattytctaggaaag

SEQ ID NO: 10725 - DNA, 21 bp, Homo sapiens
gtgatgaactygtcctctaag

SEQ ID NO: 10726 - DNA, 21 bp, Homo sapiens
tgtaggtgatkgtttcttcct

SEQ ID NO: 10727 - DNA, 21 bp, Homo sapiens
atctaaatggygaaagaaaga

SEQ ID NO: 10728 - DNA, 21 bp, Homo sapiens
tcatgtgaagstacatattga

SEQ ID NO: 10729 - DNA, 21 bp, Homo sapiens
ctcatccgctyctgggagatt

SEQ ID NO: 10730 - DNA, 21 bp, Homo sapiens
ttaacacacakataagcaggg

SEQ ID NO: 10731 - DNA, 21 bp, Homo sapiens
aaagaaaatamgaataatgga

SEQ ID NO: 10732 - DNA, 21 bp, Homo sapiens
tcagaaggctrgtatatgatt

SEQ ID NO: 10733 - DNA, 21 bp, Homo sapiens
atttttgagargctcttctgc

SEQ ID NO: 10734 - DNA, 21 bp, Homo sapiens
ctatggtctaragttccatcc

SEQ ID NO: 10735 - DNA, 21 bp, Homo sapiens
aaaaaccctastgttatatta

SEQ ID NO: 10736 - DNA, 21 bp, Homo sapiens
gggagagttgycacaggagct

SEQ ID NO: 10737 - DNA, 21 bp, Homo sapiens
tattgacccaycaaccctgaa

SEQ ID NO: 10738 - DNA, 21 bp, Homo sapiens
tcagtaggggkccctgaaagt

SEQ ID NO: 10739 - DNA, 21 bp, Homo sapiens
attcagaaccrtatgcttcta

SEQ ID NO: 10740 - DNA, 21 bp, Homo sapiens
tgcttattagygtagcatgaa

SEQ ID NO: 10741 - DNA, 21 bp, Homo sapiens
aaaatttttgrgtgtgaaaac

SEQ ID NO: 10742 - DNA, 21 bp, Homo sapiens
ctcaaaaaaawttaaactccc

SEQ ID NO: 10743 - DNA, 21 bp, Homo sapiens
ttcaccattgmtaggacttgg

SEQ ID NO: 10744 - DNA, 21 bp, Homo sapiens
cttaagttcayagcactgcaa

SEQ ID NO: 10745 - DNA, 21 bp, Homo sapiens
ttgtcaaaagsgtctatggaa

SEQ ID NO: 10746 - DNA, 21 bp, Homo sapiens
ttttagaatgytttttaaaga

SEQ ID NO: 10747 - DNA, 21 bp, Homo sapiens
ttttctagccraagttatttt

SEQ ID NO: 10748 - DNA, 21 bp, Homo sapiens
ttaagacaaakttaagtcccc

SEQ ID NO: 10749 - DNA, 21 bp, Homo sapiens
ttgatttttgwcattagtaac

SEQ ID NO: 10750 - DNA, 21 bp, Homo sapiens
ctgtggtaggraccaaatcca

SEQ ID NO: 10751 - DNA, 21 bp, Homo sapiens
ctagaaagtgrtgtaacctca

SEQ ID NO: 10752 - DNA, 21 bp, Homo sapiens
caatggaagcrccaaatgact

SEQ ID NO: 10753 - DNA, 21 bp, Homo sapiens
tttaaaccaamtcatgacctg

SEQ ID NO: 10754 - DNA, 21 bp, Homo sapiens
catgtggtttyatattagcag

SEQ ID NO: 10755 - DNA, 21 bp, Homo sapiens
tacttctgtcmacatcaagaa

SEQ ID NO: 10756 - DNA, 21 bp, Homo sapiens
gttctggttgygtggattgga

SEQ ID NO: 10757 - DNA, 21 bp, Homo sapiens
atctataagayactccttagc

SEQ ID NO: 10758 - DNA, 21 bp, Homo sapiens
tacccaagackataattggca

SEQ ID NO: 10759 - DNA, 21 bp, Homo sapiens
gataatccccygtgtaattaa

SEQ ID NO: 10760 - DNA, 21 bp, Homo sapiens
agaagctggcrtttcttagaa

SEQ ID NO: 10761 - DNA, 21 bp, Homo sapiens
gttacaggtcmaaaagccttg

SEQ ID NO: 10762 - DNA, 21 bp, Homo sapiens
ccacacatagytaaaaaggaa

SEQ ID NO: 10763 - DNA, 21 bp, Homo sapiens
gacaaggtccygaatggtgtc

SEQ ID NO: 10764 - DNA, 21 bp, Homo sapiens
agtaagaatgmatatagtcca

SEQ ID NO: 10765 - DNA, 21 bp, Homo sapiens
aaatgctaaartatcagttct

SEQ ID NO: 10766 - DNA, 21 bp, Homo sapiens
tcaatggagcytcaggttcat

SEQ ID NO: 10767 - DNA, 21 bp, Homo sapiens
cagagtattckgataaactga

SEQ ID NO: 10768 - DNA, 21 bp, Homo sapiens
tctaaacacaraaatagtcag

SEQ ID NO: 10769 - DNA, 21 bp, Homo sapiens
taaaactaaargagatgaaca

SEQ ID NO: 10770 - DNA, 21 bp, Homo sapiens
ctgctgaagcyactgaattac

SEQ ID NO: 10771 - DNA, 21 bp, Homo sapiens
ctacagtgacytctattcttg

SEQ ID NO: 10772 - DNA, 21 bp, Homo sapiens
ttcttactgcrggccacagaa

SEQ ID NO: 10773 - DNA, 21 bp, Homo sapiens
cccttatttgycaccaaacag

SEQ ID NO: 10774 - DNA, 21 bp, Homo sapiens
gactcctttgyattttccaca

SEQ ID NO: 10775 - DNA, 21 bp, Homo sapiens
tatattccatyctttaacatt

SEQ ID NO: 10776 - DNA, 21 bp, Homo sapiens
ttttcttgccyaatgctgcaa

SEQ ID NO: 10777 - DNA, 21 bp, Homo sapiens
tccatactgasagatcttccc

SEQ ID NO: 10778 - DNA, 21 bp, Homo sapiens
tacaagtagtwaatgttaaag

SEQ ID NO: 10779 - DNA, 21 bp, Homo sapiens
tgcagtagctyatatagtatt

SEQ ID NO: 10780 - DNA, 21 bp, Homo sapiens
tgtgcttaatrtgtcgtgcac

SEQ ID NO: 10781 - DNA, 21 bp, Homo sapiens
ttgatttcttygtggaccatc

SEQ ID NO: 10782 - DNA, 21 bp, Homo sapiens
gttgtttatgratggccttat

SEQ ID NO: 10783 - DNA, 21 bp, Homo sapiens
tctgcttatcrttttgcttca

SEQ ID NO: 10784 - DNA, 21 bp, Homo sapiens
ttgcattggtrgataaatgca

SEQ ID NO: 10785 - DNA, 21 bp, Homo sapiens
gaaaactgatkgcgattacta

SEQ ID NO: 10786 - DNA, 21 bp, Homo sapiens
aatgactgaasataagtcccc

SEQ ID NO: 10787 - DNA, 21 bp, Homo sapiens
ctcctttgccrtatatcaagt

SEQ ID NO: 10788 - DNA, 21 bp, Homo sapiens
acaagaggctrcagctaccaa

SEQ ID NO: 10789 - DNA, 21 bp, Homo sapiens
ggtattattcrcactagaact

SEQ ID NO: 10790 - DNA, 21 bp, Homo sapiens
tatggagcttwcaggagtggc

SEQ ID NO: 10791 - DNA, 21 bp, Homo sapiens
tgcgtcttagwattccaaaat

SEQ ID NO: 10792 - DNA, 21 bp, Homo sapiens
tatactgagakaagcagagat

SEQ ID NO: 10793 - DNA, 21 bp, Homo sapiens
ttttcactgaytgctgtataa

SEQ ID NO: 10794 - DNA, 21 bp, Homo sapiens
attcaccatcrcttatgatgg

SEQ ID NO: 10795 - DNA, 21 bp, Homo sapiens
cttctaacagytccaaagttt

SEQ ID NO: 10796 - DNA, 21 bp, Homo sapiens
tctaaatgagrcatcttggga

SEQ ID NO: 10797 - DNA, 21 bp, Homo sapiens
acttccatttrtacctgattt

SEQ ID NO: 10798 - DNA, 21 bp, Homo sapiens
cttattaaatstccttgccct

SEQ ID NO: 10799 - DNA, 21 bp, Homo sapiens
cttggagggamctcagactgt

SEQ ID NO: 10800 - DNA, 21 bp, Homo sapiens
gcctaagtgtyagaaatctgt

SEQ ID NO: 10801 - DNA, 21 bp, Homo sapiens
ggacacttaayctcactttgc

SEQ ID NO: 10802 - DNA, 21 bp, Homo sapiens
cagaaacttaytttgtgcttc

SEQ ID NO: 10803 - DNA, 21 bp, Homo sapiens
attattttacrgtcaaaagat

SEQ ID NO: 10804 - DNA, 21 bp, Homo sapiens
aaaaaagcgcrggaggaggtt

SEQ ID NO: 10805 - DNA, 21 bp, Homo sapiens
aaggtctgttkttatatggtc

SEQ ID NO: 10806 - DNA, 21 bp, Homo sapiens
tagccaatgcrgttagaagca

SEQ ID NO: 10807 - DNA, 21 bp, Homo sapiens
gaataggcagmcagtttttct

SEQ ID NO: 10808 - DNA, 21 bp, Homo sapiens
aaggtaacaarcagagtgcaa

SEQ ID NO: 10809 - DNA, 21 bp, Homo sapiens
atgagaagacrgattttaatt

SEQ ID NO: 10810 - DNA, 21 bp, Homo sapiens
ccctatcctcyctgtggctat

SEQ ID NO: 10811 - DNA, 21 bp, Homo sapiens
acttttctaayttatcctctt

SEQ ID NO: 10812 - DNA, 21 bp, Homo sapiens
ctgtctatagygttgagtcat

SEQ ID NO: 10813 - DNA, 21 bp, Homo sapiens
gtgaacatacrcacacatgtg

SEQ ID NO: 10814 - DNA, 21 bp, Homo sapiens
gtcatgagtcrtgtgtagtaa

SEQ ID NO: 10815 - DNA, 21 bp, Homo sapiens
aactacaatamcccaggtttc

SEQ ID NO: 10816 - DNA, 21 bp, Homo sapiens
ggtgatcataygcaaataact

SEQ ID NO: 10817 - DNA, 21 bp, Homo sapiens
agtcaggtgaygcagggtttt

SEQ ID NO: 10818 - DNA, 21 bp, Homo sapiens
catttcctgcycttaacaggc

SEQ ID NO: 10819 - DNA, 21 bp, Homo sapiens
agtactacaayaaagaaactg

SEQ ID NO: 10820 - DNA, 21 bp, Homo sapiens
cccatttattstgctgaaaca

SEQ ID NO: 10821 - DNA, 21 bp, Homo sapiens
gctaagctttrcgggacagtg

SEQ ID NO: 10822 - DNA, 21 bp, Homo sapiens
tgagagaaaakgaatgggtgg

SEQ ID NO: 10823 - DNA, 21 bp, Homo sapiens
agaagcatatrttgagggact

SEQ ID NO: 10824 - DNA, 21 bp, Homo sapiens
gagagtaaagytgactaacat

SEQ ID NO: 10825 - DNA, 21 bp, Homo sapiens
aagcttcagcrcaaaacattt

SEQ ID NO: 10826 - DNA, 21 bp, Homo sapiens
tatgatattarttccccagac

SEQ ID NO: 10827 - DNA, 21 bp, Homo sapiens
cataaaaattyaagtagcttt

SEQ ID NO: 10828 - DNA, 21 bp, Homo sapiens
ttccatacagyactgagaggg

SEQ ID NO: 10829 - DNA, 21 bp, Homo sapiens
gaaggcagcarcagagagcat

SEQ ID NO: 10830 - DNA, 21 bp, Homo sapiens
tatgtcaccaktagatgtgtc

SEQ ID NO: 10831 - DNA, 21 bp, Homo sapiens
tggcttgttgmaacattacaa

SEQ ID NO: 10832 - DNA, 21 bp, Homo sapiens
tggaccgactrgctgaatggg

SEQ ID NO: 10833 - DNA, 21 bp, Homo sapiens
aagggcagcaragtgaagtgc

SEQ ID NO: 10834 - DNA, 21 bp, Homo sapiens
aagtgagagaygttcttagta

SEQ ID NO: 10835 - DNA, 21 bp, Homo sapiens
ttgccttggawgacatcctct

SEQ ID NO: 10836 - DNA, 21 bp, Homo sapiens
acatcacttcyggtataaagc

SEQ ID NO: 10837 - DNA, 21 bp, Homo sapiens
aaaggataccrtcattccatt

SEQ ID NO: 10838 - DNA, 21 bp, Homo sapiens
attgggaaagrgcaggagaaa

SEQ ID NO: 10839 - DNA, 21 bp, Homo sapiens
atgaaaattcktttggctaag

SEQ ID NO: 10840 - DNA, 21 bp, Homo sapiens
acacatgaaaygcccacagac

SEQ ID NO: 10841 - DNA, 21 bp, Homo sapiens
gggatgctggygggttagcac

SEQ ID NO: 10842 - DNA, 21 bp, Homo sapiens
ttttttgtttmtcctccttga

SEQ ID NO: 10843 - DNA, 21 bp, Homo sapiens
aactgatgggycgagcctgct

SEQ ID NO: 10844 - DNA, 21 bp, Homo sapiens
tgccagtctarcctactttgg

SEQ ID NO: 10845 - DNA, 21 bp, Homo sapiens
ataagcactcrtttctgctgg

SEQ ID NO: 10846 - DNA, 21 bp, Homo sapiens
actaaggacgrctagactgat

SEQ ID NO: 10847 - DNA, 21 bp, Homo sapiens
ctgatatacakattgtactta

SEQ ID NO: 10848 - DNA, 21 bp, Homo sapiens
actttgcttcyaattacagct

SEQ ID NO: 10849 - DNA, 21 bp, Homo sapiens
ttggtagtccrgtaagaagat

SEQ ID NO: 10850 - DNA, 21 bp, Homo sapiens
cttagtctgcyatgattatcc

SEQ ID NO: 10851 - DNA, 21 bp, Homo sapiens
ctagatttacrtagttcggct

SEQ ID NO: 10852 - DNA, 21 bp, Homo sapiens
tattaattaaragagaaatct

SEQ ID NO: 10853 - DNA, 21 bp, Homo sapiens
aggaatgagayaagaattgtg

SEQ ID NO: 10854 - DNA, 21 bp, Homo sapiens
gagagaaccawtctccatgag

SEQ ID NO: 10855 - DNA, 21 bp, Homo sapiens
ttgtttcctgyaccagcgcag

SEQ ID NO: 10856 - DNA, 21 bp, Homo sapiens
acttcatacarcatatagctt

SEQ ID NO: 10857 - DNA, 21 bp, Homo sapiens
acaaactatawaaatggaatg

SEQ ID NO: 10858 - DNA, 21 bp, Homo sapiens
aggatatactrtttacattgt

SEQ ID NO: 10859 - DNA, 21 bp, Homo sapiens
ggccaatgaaractcccatgc

SEQ ID NO: 10860 - DNA, 21 bp, Homo sapiens
ctgattcctcratccctttgg

SEQ ID NO: 10861 - DNA, 21 bp, Homo sapiens
tgtgtataatrtcaactatta

SEQ ID NO: 10862 - DNA, 21 bp, Homo sapiens
gacacaaataygcaagaaaga

SEQ ID NO: 10863 - DNA, 21 bp, Homo sapiens
gaggcagcttrctggggacct

SEQ ID NO: 10864 - DNA, 21 bp, Homo sapiens
aaaagtgtgargctgttcatc

SEQ ID NO: 10865 - DNA, 21 bp, Homo sapiens
ctggcaggacytgcagcattt

SEQ ID NO: 10866 - DNA, 21 bp, Homo sapiens
ttcatgtcagrggtatcagtc

SEQ ID NO: 10867 - DNA, 21 bp, Homo sapiens
tgtatagactrtaccccaaaa

SEQ ID NO: 10868 - DNA, 21 bp, Homo sapiens
ggaaaagctcytatcatttgc

SEQ ID NO: 10869 - DNA, 21 bp, Homo sapiens
tctcctgcagmtgcggatact

SEQ ID NO: 10870 - DNA, 21 bp, Homo sapiens
tcaaaaagaarggctgcttag

SEQ ID NO: 10871 - DNA, 21 bp, Homo sapiens
aaagtggtagkaaaacaagtt

SEQ ID NO: 10872 - DNA, 21 bp, Homo sapiens
ttaaacattamattcagttca

SEQ ID NO: 10873 - DNA, 21 bp, Homo sapiens
ccagactgaayttggattaaa

SEQ ID NO: 10874 - DNA, 21 bp, Homo sapiens
aggagtgccaraatgctcatt

SEQ ID NO: 10875 - DNA, 21 bp, Homo sapiens
catgatcagcraagtttttaa

SEQ ID NO: 10876 - DNA, 21 bp, Homo sapiens
ccaagcctgcwcatttctgat

SEQ ID NO: 10877 - DNA, 21 bp, Homo sapiens
gtgcatttgcwttctgtccaa

SEQ ID NO: 10878 - DNA, 21 bp, Homo sapiens
tctcatgctcyctcaccgtga

SEQ ID NO: 10879 - DNA, 21 bp, Homo sapiens
ctgctaacccrtacattcatt

SEQ ID NO: 10880 - DNA, 21 bp, Homo sapiens
gaaacacttcrtcatattata

SEQ ID NO: 10881 - DNA, 21 bp, Homo sapiens
tgaggaggcawgattttgcaa

SEQ ID NO: 10882 - DNA, 21 bp, Homo sapiens
tataaaagttscatgtaccta

SEQ ID NO: 10883 - DNA, 21 bp, Homo sapiens
gaatactgtgkaagtgcaacc

SEQ ID NO: 10884 - DNA, 21 bp, Homo sapiens
tatacatggcrcagcaaatga

SEQ ID NO: 10885 - DNA, 21 bp, Homo sapiens
gaacatggtargagcagtgtt

SEQ ID NO: 10886 - DNA, 21 bp, Homo sapiens
tttttattgtsaattgatgat

SEQ ID NO: 10887 - DNA, 21 bp, Homo sapiens
tgccagttttrttttaacaca

SEQ ID NO: 10888 - DNA, 21 bp, Homo sapiens
aaaataataaygatgatttgc

SEQ ID NO: 10889 - DNA, 21 bp, Homo sapiens
aagcattcctyactgcccagt

SEQ ID NO: 10890 - DNA, 21 bp, Homo sapiens
caggtaaattmatcacgtgca

SEQ ID NO: 10891 - DNA, 21 bp, Homo sapiens
gagggtagttrgtaattgcca

SEQ ID NO: 10892 - DNA, 21 bp, Homo sapiens
attgaattgtyccattgcaat

SEQ ID NO: 10893 - DNA, 21 bp, Homo sapiens
tgactgccaamtcttatgctc

SEQ ID NO: 10894 - DNA, 21 bp, Homo sapiens
cctgtggggakagtgagttgt

SEQ ID NO: 10895 - DNA, 21 bp, Homo sapiens
atatttacctrttacttcaat

SEQ ID NO: 10896 - DNA, 21 bp, Homo sapiens
tttcattcaayagtacaatct

SEQ ID NO: 10897 - DNA, 21 bp, Homo sapiens
gattgtgtatygtgcttctag

SEQ ID NO: 10898 - DNA, 21 bp, Homo sapiens
cagctatagcrtctcatcttt

SEQ ID NO: 10899 - DNA, 21 bp, Homo sapiens
ctcacacttamtggtgtaaaa

SEQ ID NO: 10900 - DNA, 21 bp, Homo sapiens
agtggtaatcrtctctgtttc

SEQ ID NO: 10901 - DNA, 21 bp, Homo sapiens
agagaaaaggyggctgctttt

SEQ ID NO: 10902 - DNA, 21 bp, Homo sapiens
gaagcatgtcstaatgagaga

SEQ ID NO: 10903 - DNA, 21 bp, Homo sapiens
tatattctctmtcctcccaca

SEQ ID NO: 10904 - DNA, 21 bp, Homo sapiens
cttagatgtcrtaaatgtttt

SEQ ID NO: 10905 - DNA, 21 bp, Homo sapiens
tgcaagaattyagaccatgat

SEQ ID NO: 10906 - DNA, 21 bp, Homo sapiens
aatgcagggasttactcagag

SEQ ID NO: 10907 - DNA, 21 bp, Homo sapiens
cctataactayaggtctttat

SEQ ID NO: 10908 - DNA, 21 bp, Homo sapiens
catttaagctmtaagtcagtt

SEQ ID NO: 10909 - DNA, 21 bp, Homo sapiens
taaaattcagrtgaatgagac

SEQ ID NO: 10910 - DNA, 21 bp, Homo sapiens
taacatcattytgacagaact

SEQ ID NO: 10911 - DNA, 21 bp, Homo sapiens
tttgctcaaayccctagagat

SEQ ID NO: 10912 - DNA, 21 bp, Homo sapiens
ggaacttcctkctgcaaaaca

SEQ ID NO: 10913 - DNA, 21 bp, Homo sapiens
acaagactatmatgaaggaca

SEQ ID NO: 10914 - DNA, 21 bp, Homo sapiens
gattacatgawtgtggatttc

SEQ ID NO: 10915 - DNA, 21 bp, Homo sapiens
acagggaaaasccagatttgg

SEQ ID NO: 10916 - DNA, 21 bp, Homo sapiens
atgttgtatgyttatagtaca

SEQ ID NO: 10917 - DNA, 21 bp, Homo sapiens
agcttaagtasggtttataca

SEQ ID NO: 10918 - DNA, 21 bp, Homo sapiens
gatctatgagrgttatagaaa

SEQ ID NO: 10919 - DNA, 21 bp, Homo sapiens
agtcaagatgkcaaggaggct

SEQ ID NO: 10920 - DNA, 21 bp, Homo sapiens
tcagttctagragctgcctat

SEQ ID NO: 10921 - DNA, 21 bp, Homo sapiens
ttgttttcttyctaaaggcct

SEQ ID NO: 10922 - DNA, 21 bp, Homo sapiens
gaacatccttktaacttcaga

SEQ ID NO: 10923 - DNA, 21 bp, Homo sapiens
gtccaatcttrttttacatat

SEQ ID NO: 10924 - DNA, 21 bp, Homo sapiens
caatagttccyattttccaca

SEQ ID NO: 10925 - DNA, 21 bp, Homo sapiens
tccagtccctkccctataacc

SEQ ID NO: 10926 - DNA, 21 bp, Homo sapiens
gccaaggacarttatacagaa

SEQ ID NO: 10927 - DNA, 21 bp, Homo sapiens
ctctagttttrtcccatatgg

SEQ ID NO: 10928 - DNA, 21 bp, Homo sapiens
taattgatggytttaaaaaat

SEQ ID NO: 10929 - DNA, 21 bp, Homo sapiens
gtctccacatragtcttagtc

SEQ ID NO: 10930 - DNA, 21 bp, Homo sapiens
agaatttcccygtgatcctgg

SEQ ID NO: 10931 - DNA, 21 bp, Homo sapiens
ctgtgtttcarattctctacc

SEQ ID NO: 10932 - DNA, 21 bp, Homo sapiens
ggggttaacaygaatttaact

SEQ ID NO: 10933 - DNA, 21 bp, Homo sapiens
gggcaagcctstccaaaagcc

SEQ ID NO: 10934 - DNA, 21 bp, Homo sapiens
agtctagcccyggtttccaaa

SEQ ID NO: 10935 - DNA, 21 bp, Homo sapiens
tggaggccaarctctagcctc

SEQ ID NO: 10936 - DNA, 21 bp, Homo sapiens
tgaaagtactytgtgaagtgc

SEQ ID NO: 10937 - DNA, 21 bp, Homo sapiens
ccaaaagtaasttttagaatt

SEQ ID NO: 10938 - DNA, 21 bp, Homo sapiens
acgttggctgygaatcagctc

SEQ ID NO: 10939 - DNA, 21 bp, Homo sapiens
acacagccctsgtttgctcgt

SEQ ID NO: 10940 - DNA, 21 bp, Homo sapiens
tacaggaaaaygtgaatggtg

SEQ ID NO: 10941 - DNA, 21 bp, Homo sapiens
atgaaaacacracatccattc

SEQ ID NO: 10942 - DNA, 21 bp, Homo sapiens
taaatactaartttcttgtgt

SEQ ID NO: 10943 - DNA, 21 bp, Homo sapiens
atatgcttggyattccccaga

SEQ ID NO: 10944 - DNA, 21 bp, Homo sapiens
gaaaacattcyacaaaggaaa

SEQ ID NO: 10945 - DNA, 21 bp, Homo sapiens
ggagagaagtmtaaaatgtaa

SEQ ID NO: 10946 - DNA, 21 bp, Homo sapiens
ttgacacttgyggatccatta

SEQ ID NO: 10947 - DNA, 21 bp, Homo sapiens
gtcatctggarcctccttgat

SEQ ID NO: 10948 - DNA, 21 bp, Homo sapiens
cactgccaaayggcacggtgg

SEQ ID NO: 10949 - DNA, 21 bp, Homo sapiens
tctgaatgtcrgctcatcacg

SEQ ID NO: 10950 - DNA, 21 bp, Homo sapiens
ttccaagggtkgaaactgtac

SEQ ID NO: 10951 - DNA, 21 bp, Homo sapiens
acatctacacrtcttgtgttt

SEQ ID NO: 10952 - DNA, 21 bp, Homo sapiens
ataatgatccrttctcaatta

SEQ ID NO: 10953 - DNA, 21 bp, Homo sapiens
gctagtaatckctctttcttt

SEQ ID NO: 10954 - DNA, 21 bp, Homo sapiens
cacgtctatcytatcaaactt

SEQ ID NO: 10955 - DNA, 21 bp, Homo sapiens
aagtaatcaaygtgtttgtgt

SEQ ID NO: 10956 - DNA, 21 bp, Homo sapiens
tttacaaaacrctttcttaca

SEQ ID NO: 10957 - DNA, 21 bp, Homo sapiens
gtcgtctaacktctttctgaa

SEQ ID NO: 10958 - DNA, 21 bp, Homo sapiens
ataatactcartggttcttat

SEQ ID NO: 10959 - DNA, 21 bp, Homo sapiens
gtctgctactraccgctgatg

SEQ ID NO: 10960 - DNA, 21 bp, Homo sapiens
gtgctttatcyactgacttac

SEQ ID NO: 10961 - DNA, 21 bp, Homo sapiens
gactcacatcrggccagtagg

SEQ ID NO: 10962 - DNA, 21 bp, Homo sapiens
cattcaaactyaaggttcaaa

SEQ ID NO: 10963 - DNA, 21 bp, Homo sapiens
aatggaatgasctttgtactg

SEQ ID NO: 10964 - DNA, 21 bp, Homo sapiens
tgatttcaaaygtggcaatgg

SEQ ID NO: 10965 - DNA, 21 bp, Homo sapiens
gtgataggatrgtacctttga

SEQ ID NO: 10966 - DNA, 21 bp, Homo sapiens
agtccctcatyggtctctggt

SEQ ID NO: 10967 - DNA, 21 bp, Homo sapiens
acgttttctcrgtatctttga

SEQ ID NO: 10968 - DNA, 21 bp, Homo sapiens
cgtgccggttrtccaaggcaa

SEQ ID NO: 10969 - DNA, 21 bp, Homo sapiens
caagtgattaytgtagtgccc

SEQ ID NO: 10970 - DNA, 21 bp, Homo sapiens
tgggcatggtycacgtattta

SEQ ID NO: 10971 - DNA, 21 bp, Homo sapiens
aaattttaccrtaagtacaac

SEQ ID NO: 10972 - DNA, 21 bp, Homo sapiens
tttgagggaaygatggcatgg

SEQ ID NO: 10973 - DNA, 21 bp, Homo sapiens
tcagagatctkttgtaaggat

SEQ ID NO: 10974 - DNA, 21 bp, Homo sapiens
atgcctttcasactaagatgc

SEQ ID NO: 10975 - DNA, 21 bp, Homo sapiens
attttgaagcmgttagacctt

SEQ ID NO: 10976 - DNA, 21 bp, Homo sapiens
actaaaaatcscttattttct

SEQ ID NO: 10977 - DNA, 21 bp, Homo sapiens
accttttcagygtgagtatag

SEQ ID NO: 10978 - DNA, 21 bp, Homo sapiens
tgcacgttatsctgggttagg

SEQ ID NO: 10979 - DNA, 21 bp, Homo sapiens
ggataaagtamattaacagta

SEQ ID NO: 10980 - DNA, 21 bp, Homo sapiens
catccctcaartagtgaaatt

SEQ ID NO: 10981 - DNA, 21 bp, Homo sapiens
ctgtatttgtrgcaaagctgg

SEQ ID NO: 10982 - DNA, 21 bp, Homo sapiens
acatcttttgktctttctgtg

SEQ ID NO: 10983 - DNA, 21 bp, Homo sapiens
agagcttgtgsttttctggtt

SEQ ID NO: 10984 - DNA, 21 bp, Homo sapiens
ctaaccctctmgttgaattaa

SEQ ID NO: 10985 - DNA, 21 bp, Homo sapiens
gtttttcaagygtgaaatgag

SEQ ID NO: 10986 - DNA, 21 bp, Homo sapiens
ggacagggctmcaaaatgatt

SEQ ID NO: 10987 - DNA, 21 bp, Homo sapiens
gtactttcttrtccctctgtt

SEQ ID NO: 10988 - DNA, 21 bp, Homo sapiens
tttgaaacttyatataggatt

SEQ ID NO: 10989 - DNA, 21 bp, Homo sapiens
aaaagagctcratggttggga

SEQ ID NO: 10990 - DNA, 21 bp, Homo sapiens
ttgattcattsaggcagggct

SEQ ID NO: 10991 - DNA, 21 bp, Homo sapiens
atccgcgagastcaggcaaga

SEQ ID NO: 10992 - DNA, 21 bp, Homo sapiens
ggaagcgtggrgaacattaaa

SEQ ID NO: 10993 - DNA, 21 bp, Homo sapiens
aattttagtaygcctctatca

SEQ ID NO: 10994 - DNA, 21 bp, Homo sapiens
ttgcttcaggkagttatatgg

SEQ ID NO: 10995 - DNA, 21 bp, Homo sapiens
aggcagaaccyaattcaaatc

SEQ ID NO: 10996 - DNA, 21 bp, Homo sapiens
ttccttatccrtctgacttat

SEQ ID NO: 10997 - DNA, 21 bp, Homo sapiens
atcttgaaatytgaagaagag

SEQ ID NO: 10998 - DNA, 21 bp, Homo sapiens
attcctggccratagccactt

SEQ ID NO: 10999 - DNA, 21 bp, Homo sapiens
gattccctttytgaggtaagg

SEQ ID NO: 11000 - DNA, 21 bp, Homo sapiens
ccggacttgtstattcaaccc

SEQ ID NO: 11001 - DNA, 21 bp, Homo sapiens
aaggtcagcastctgtgcaac

SEQ ID NO: 11002 - DNA, 21 bp, Homo sapiens
gtttgccgttrgtatttgttt

SEQ ID NO: 11003 - DNA, 21 bp, Homo sapiens
agaggcgccartttgactcac

SEQ ID NO: 11004 - DNA, 21 bp, Homo sapiens
cctcgccccartgttaattct

SEQ ID NO: 11005 - DNA, 21 bp, Homo sapiens
gctaaaaggascaggtgtgag

SEQ ID NO: 11006 - DNA, 21 bp, Homo sapiens
tcatggatacraggtcagcag

SEQ ID NO: 11007 - DNA, 21 bp, Homo sapiens
atgttacccaygttgaggaag

SEQ ID NO: 11008 - DNA, 21 bp, Homo sapiens
gacgactcaakgcacagaggc

SEQ ID NO: 11009 - DNA, 21 bp, Homo sapiens
ttgtgctaacygatggacagc

SEQ ID NO: 11010 - DNA, 21 bp, Homo sapiens
ttatcagcgtrctggctccga

SEQ ID NO: 11011 - DNA, 21 bp, Homo sapiens
aaggtagaaayggcagtaagg

SEQ ID NO: 11012 - DNA, 21 bp, Homo sapiens
atgatgagttycctgcacata

SEQ ID NO: 11013 - DNA, 21 bp, Homo sapiens
gtcttctttayagttgagcac

SEQ ID NO: 11014 - DNA, 21 bp, Homo sapiens
gcttgtactcsctctgaggtt

SEQ ID NO: 11015 - DNA, 21 bp, Homo sapiens
aatcagttacmataaacttaa

SEQ ID NO: 11016 - DNA, 21 bp, Homo sapiens
gagacgctttmttttacattt

SEQ ID NO: 11017 - DNA, 21 bp, Homo sapiens
gaaaccaatasactttcagaa

SEQ ID NO: 11018 - DNA, 21 bp, Homo sapiens
acttagccctrtatgagtcat

SEQ ID NO: 11019 - DNA, 21 bp, Homo sapiens
gaaattcttcstatttatctc

SEQ ID NO: 11020 - DNA, 21 bp, Homo sapiens
aaatcccattrctagcaaacc

SEQ ID NO: 11021 - DNA, 21 bp, Homo sapiens
caatatattcragtaagtatc

SEQ ID NO: 11022 - DNA, 21 bp, Homo sapiens
cttgccatgastgaaagctgg

SEQ ID NO: 11023 - DNA, 21 bp, Homo sapiens
tgaggagttgragtagcaaca

SEQ ID NO: 11024 - DNA, 21 bp, Homo sapiens
gcctaatagcrcagttgatga

SEQ ID NO: 11025 - DNA, 21 bp, Homo sapiens
gcacattagtytggtaactga

SEQ ID NO: 11026 - DNA, 21 bp, Homo sapiens
tggtgttttgrtaagtagtat

SEQ ID NO: 11027 - DNA, 21 bp, Homo sapiens
ataattataargtttcatgta

SEQ ID NO: 11028 - DNA, 21 bp, Homo sapiens
cattttcttayaaggcgtgaa

SEQ ID NO: 11029 - DNA, 21 bp, Homo sapiens
tatgaacacgraaggaaatat

SEQ ID NO: 11030 - DNA, 21 bp, Homo sapiens
acgtttaaatkattctgactt

SEQ ID NO: 11031 - DNA, 21 bp, Homo sapiens
ctaatgagttratgtgctggg

SEQ ID NO: 11032 - DNA, 21 bp, Homo sapiens
caactcatgayatatatccag

SEQ ID NO: 11033 - DNA, 21 bp, Homo sapiens
tctagaaagayatttgtgcat

SEQ ID NO: 11034 - DNA, 21 bp, Homo sapiens
gttctaatgartgaagcagag

SEQ ID NO: 11035 - DNA, 21 bp, Homo sapiens
gcctgtttttyaccctttttc

SEQ ID NO: 11036 - DNA, 21 bp, Homo sapiens
tgctatatggratgccagtga

SEQ ID NO: 11037 - DNA, 21 bp, Homo sapiens
atggaaaactratatgcaaaa

SEQ ID NO: 11038 - DNA, 21 bp, Homo sapiens
atttgcatagmaatttgcgaa

SEQ ID NO: 11039 - DNA, 21 bp, Homo sapiens
gagttctgttraaaatgatta

SEQ ID NO: 11040 - DNA, 21 bp, Homo sapiens
tataaataatyagaagttgtg

SEQ ID NO: 11041 - DNA, 21 bp, Homo sapiens
tttattatgcwtatcactagt

SEQ ID NO: 11042 - DNA, 21 bp, Homo sapiens
ctgagtcgttktagttttttt

SEQ ID NO: 11043 - DNA, 21 bp, Homo sapiens
attatgaacayctaagtaacc

SEQ ID NO: 11044 - DNA, 21 bp, Homo sapiens
caattcaaggraacgatcagt

SEQ ID NO: 11045 - DNA, 21 bp, Homo sapiens
ttcaacaggtygggcagggat

SEQ ID NO: 11046 - DNA, 21 bp, Homo sapiens
tacccttgccrtgcttgcgcc

SEQ ID NO: 11047 - DNA, 21 bp, Homo sapiens
attttcagtgyaatttggact

SEQ ID NO: 11048 - DNA, 21 bp, Homo sapiens
ccagtgttgcyctgaaagatg

SEQ ID NO: 11049 - DNA, 21 bp, Homo sapiens
aaacccaaatyggtcaattgg

SEQ ID NO: 11050 - DNA, 21 bp, Homo sapiens
atttttccatkacagattaga

SEQ ID NO: 11051 - DNA, 21 bp, Homo sapiens
accgtggatayggaaactttg

SEQ ID NO: 11052 - DNA, 21 bp, Homo sapiens
acaagtaaatsaattgagcta

SEQ ID NO: 11053 - DNA, 21 bp, Homo sapiens
aaggggctgcwctaggttagc

SEQ ID NO: 11054 - DNA, 21 bp, Homo sapiens
gagaattgacyatagcactgt

SEQ ID NO: 11055 - DNA, 21 bp, Homo sapiens
actggtgaaasagcaaagacc

SEQ ID NO: 11056 - DNA, 21 bp, Homo sapiens
tctttgtatcrttaaagaagt

SEQ ID NO: 11057 - DNA, 21 bp, Homo sapiens
ctgaataattyttcgtgtact

SEQ ID NO: 11058 - DNA, 21 bp, Homo sapiens
gttgagacacyaggaattcaa

SEQ ID NO: 11059 - DNA, 21 bp, Homo sapiens
aattaaaaatrtctctcaatg

SEQ ID NO: 11060 - DNA, 21 bp, Homo sapiens
acattttggcrctaatacatt

SEQ ID NO: 11061 - DNA, 21 bp, Homo sapiens
tcaaacagttwatgctaaaac

SEQ ID NO: 11062 - DNA, 21 bp, Homo sapiens
tttaagatccrtaaactagtc

SEQ ID NO: 11063 - DNA, 21 bp, Homo sapiens
tttacacagaraaaaagacat

SEQ ID NO: 11064 - DNA, 21 bp, Homo sapiens
aaatcatgagwcaactgggtg

SEQ ID NO: 11065 - DNA, 21 bp, Homo sapiens
tcaaacaaacmctgaattcat

SEQ ID NO: 11066 - DNA, 21 bp, Homo sapiens
agctggcacayggagttctgg

SEQ ID NO: 11067 - DNA, 21 bp, Homo sapiens
aggtcagtggyacaattatgg

SEQ ID NO: 11068 - DNA, 21 bp, Homo sapiens
acaattatcarttttgtggaa

SEQ ID NO: 11069 - DNA, 21 bp, Homo sapiens
agtagcggtgytgggactctc

SEQ ID NO: 11070 - DNA, 21 bp, Homo sapiens
tatctacctayatatctttgt

SEQ ID NO: 11071 - DNA, 21 bp, Homo sapiens
cctattttackgatttatgta

SEQ ID NO: 11072 - DNA, 21 bp, Homo sapiens
ttgtacatttytgtgtctctc

SEQ ID NO: 11073 - DNA, 21 bp, Homo sapiens
gaatttttgcrtatatgtttg

SEQ ID NO: 11074 - DNA, 21 bp, Homo sapiens
cttagcagctrtgtgatctgg

SEQ ID NO: 11075 - DNA, 21 bp, Homo sapiens
gagccaaatayacatcgggcc

SEQ ID NO: 11076 - DNA, 21 bp, Homo sapiens
gagaaatggtsagactttgga

SEQ ID NO: 11077 - DNA, 21 bp, Homo sapiens
ttaaattcacrtgttaaaaac

SEQ ID NO: 11078 - DNA, 21 bp, Homo sapiens
tggtggcctckttctctagat

SEQ ID NO: 11079 - DNA, 21 bp, Homo sapiens
atgataattcyaagctactga

SEQ ID NO: 11080 - DNA, 21 bp, Homo sapiens
tgtttatgagmtactctactg

SEQ ID NO: 11081 - DNA, 21 bp, Homo sapiens
atggatattcygaaaattccc

SEQ ID NO: 11082 - DNA, 21 bp, Homo sapiens
tgctatctgcrtgtacaaatt

SEQ ID NO: 11083 - DNA, 21 bp, Homo sapiens
ggagttaaggwttattagagg

SEQ ID NO: 11084 - DNA, 21 bp, Homo sapiens
atattaagttrtgctcagatg

SEQ ID NO: 11085 - DNA, 21 bp, Homo sapiens
tgtgaggatgyttagacaggg

SEQ ID NO: 11086 - DNA, 21 bp, Homo sapiens
tactatatgcyttgcagacca

SEQ ID NO: 11087 - DNA, 21 bp, Homo sapiens
aaggatgtttmttcactgtga

SEQ ID NO: 11088 - DNA, 21 bp, Homo sapiens
ctattgaggcyaaagacttga

SEQ ID NO: 11089 - DNA, 21 bp, Homo sapiens
gctctacaacrctagttataa

SEQ ID NO: 11090 - DNA, 21 bp, Homo sapiens
atcagtcaatmcccaaaagtt

SEQ ID NO: 11091 - DNA, 21 bp, Homo sapiens
cagccagctcygggagacaca

SEQ ID NO: 11092 - DNA, 21 bp, Homo sapiens
aaaaatataamaaaggcttca

SEQ ID NO: 11093 - DNA, 21 bp, Homo sapiens
tatgtcttgtraaaagagaac

SEQ ID NO: 11094 - DNA, 21 bp, Homo sapiens
tctctatagtrtgtatttcct

SEQ ID NO: 11095 - DNA, 21 bp, Homo sapiens
ttatgaccagmcgcagaagtt

SEQ ID NO: 11096 - DNA, 21 bp, Homo sapiens
gtatgaaacarttaaattgaa

SEQ ID NO: 11097 - DNA, 21 bp, Homo sapiens
ccttcctgtgrcagagtgggc

SEQ ID NO: 11098 - DNA, 21 bp, Homo sapiens
caggtgagagytagcttttga

SEQ ID NO: 11099 - DNA, 21 bp, Homo sapiens
gtaaaggaagwtttcggtgta

SEQ ID NO: 11100 - DNA, 21 bp, Homo sapiens
tggacaattawtcacatataa

SEQ ID NO: 11101 - DNA, 21 bp, Homo sapiens
tagcttttttygtgaaccaac

SEQ ID NO: 11102 - DNA, 21 bp, Homo sapiens
tttttctccaygtacagacta

SEQ ID NO: 11103 - DNA, 21 bp, Homo sapiens
cagcctaacargtcacatcct

SEQ ID NO: 11104 - DNA, 21 bp, Homo sapiens
tctcatcacartaatgctata

SEQ ID NO: 11105 - DNA, 21 bp, Homo sapiens
atcctaatccygattacccac

SEQ ID NO: 11106 - DNA, 21 bp, Homo sapiens
ggaacttctgkgttttttacc

SEQ ID NO: 11107 - DNA, 21 bp, Homo sapiens
gggctgaaccstatagagacc

SEQ ID NO: 11108 - DNA, 21 bp, Homo sapiens
tgttttggatraagggacatg

SEQ ID NO: 11109 - DNA, 21 bp, Homo sapiens
gagatgtgaamtagcttttac

SEQ ID NO: 11110 - DNA, 21 bp, Homo sapiens
tttcctgttckgcaaagcagt

SEQ ID NO: 11111 - DNA, 21 bp, Homo sapiens
gaacatttaaktcttggataa

SEQ ID NO: 11112 - DNA, 21 bp, Homo sapiens
ttattttccaytaatgatatg

SEQ ID NO: 11113 - DNA, 21 bp, Homo sapiens
gtcagcttcawctcttttcag

SEQ ID NO: 11114 - DNA, 21 bp, Homo sapiens
gatgcagtatktcctaacctg

SEQ ID NO: 11115 - DNA, 21 bp, Homo sapiens
ggaaacactgmacttttatgt

SEQ ID NO: 11116 - DNA, 21 bp, Homo sapiens
ttttatctatrcctactgaaa

SEQ ID NO: 11117 - DNA, 21 bp, Homo sapiens
agaatttaagygcttattaaa

SEQ ID NO: 11118 - DNA, 21 bp, Homo sapiens
ttgctgtaaamctatatttca

SEQ ID NO: 11119 - DNA, 21 bp, Homo sapiens
ttatgaagatyaggcaactgc

SEQ ID NO: 11120 - DNA, 21 bp, Homo sapiens
aaaccctggamaaagacaagg

SEQ ID NO: 11121 - DNA, 21 bp, Homo sapiens
ctacgcatccrcaccccaggc

SEQ ID NO: 11122 - DNA, 21 bp, Homo sapiens
caccacctctytcagtaaccc

SEQ ID NO: 11123 - DNA, 21 bp, Homo sapiens
tcagtactcarggtctgtcag

SEQ ID NO: 11124 - DNA, 21 bp, Homo sapiens
cagaacaggarttaccaaaga

SEQ ID NO: 11125 - DNA, 21 bp, Homo sapiens
tggagatactyggtaaatgtt

SEQ ID NO: 11126 - DNA, 21 bp, Homo sapiens
gagatgcctaygaaaatagag

SEQ ID NO: 11127 - DNA, 21 bp, Homo sapiens
agagtaatctkgtggaaagac

SEQ ID NO: 11128 - DNA, 21 bp, Homo sapiens
ctggaatgatrgtgagctagt

SEQ ID NO: 11129 - DNA, 21 bp, Homo sapiens
cacgtgtcaargaagaggcca

SEQ ID NO: 11130 - DNA, 21 bp, Homo sapiens
atgttctgtcytatttccagt

SEQ ID NO: 11131 - DNA, 21 bp, Homo sapiens
tgaggtttctsttacatgttt

SEQ ID NO: 11132 - DNA, 21 bp, Homo sapiens
agggagaaaayagtctaacac

SEQ ID NO: 11133 - DNA, 21 bp, Homo sapiens
gcatatacttrggttgggttt

SEQ ID NO: 11134 - DNA, 21 bp, Homo sapiens
aaaactcaagmaacataaggt

SEQ ID NO: 11135 - DNA, 21 bp, Homo sapiens
actaaaaacartaacattttg

SEQ ID NO: 11136 - DNA, 21 bp, Homo sapiens
gaatctcttcygctcacgggt

SEQ ID NO: 11137 - DNA, 21 bp, Homo sapiens
atgaagaagcrgagggagata

SEQ ID NO: 11138 - DNA, 21 bp, Homo sapiens
aatgtgaaaartatatgtatg

SEQ ID NO: 11139 - DNA, 21 bp, Homo sapiens
tgcaatttggyttaattgtaa

SEQ ID NO: 11140 - DNA, 21 bp, Homo sapiens
taggaagctgktaggtatctt

SEQ ID NO: 11141 - DNA, 21 bp, Homo sapiens
tggattgagaygtgagagatc

SEQ ID NO: 11142 - DNA, 21 bp, Homo sapiens
aataatgttaytgacagatca

SEQ ID NO: 11143 - DNA, 21 bp, Homo sapiens
gtttgaagtayggtgggtatg

SEQ ID NO: 11144 - DNA, 21 bp, Homo sapiens
tgaaaaacagwttaccagtag

SEQ ID NO: 11145 - DNA, 21 bp, Homo sapiens
aagtagagccrtaaacaacca

SEQ ID NO: 11146 - DNA, 21 bp, Homo sapiens
acaagtctcargagctattaa

SEQ ID NO: 11147 - DNA, 21 bp, Homo sapiens
aatagaggacscatccatgct

SEQ ID NO: 11148 - DNA, 21 bp, Homo sapiens
ccactgttttsaagatgattt

SEQ ID NO: 11149 - DNA, 21 bp, Homo sapiens
atgactgatgyacggatgtta

SEQ ID NO: 11150 - DNA, 21 bp, Homo sapiens
ttacagggccraggtaacaag

SEQ ID NO: 11151 - DNA, 21 bp, Homo sapiens
ctagaaaacayttttattact

SEQ ID NO: 11152 - DNA, 21 bp, Homo sapiens
gcaaaatccgyttttcttagg

SEQ ID NO: 11153 - DNA, 21 bp, Homo sapiens
ttacctttatytggccatgta

SEQ ID NO: 11154 - DNA, 21 bp, Homo sapiens
gctggcataargtcatgaaaa

SEQ ID NO: 11155 - DNA, 21 bp, Homo sapiens
tgaactgttayaccacttccc

SEQ ID NO: 11156 - DNA, 21 bp, Homo sapiens
catctagcatyatcttaacta

SEQ ID NO: 11157 - DNA, 21 bp, Homo sapiens
tatatttgcaygtcaactcta

SEQ ID NO: 11158 - DNA, 21 bp, Homo sapiens
tcatgcggggmctgatgaaaa

SEQ ID NO: 11159 - DNA, 21 bp, Homo sapiens
ctccctctcartcctgtagtt

SEQ ID NO: 11160 - DNA, 21 bp, Homo sapiens
ctagatagagrtgaaatgctt

SEQ ID NO: 11161 - DNA, 21 bp, Homo sapiens
cttactttttytgtcattgcc

SEQ ID NO: 11162 - DNA, 21 bp, Homo sapiens
gtcaaaggctrttatgtacag

SEQ ID NO: 11163 - DNA, 21 bp, Homo sapiens
ccaagtaaaaycaatcttaca

SEQ ID NO: 11164 - DNA, 21 bp, Homo sapiens
aaaaatcttaygcatgaagaa

SEQ ID NO: 11165 - DNA, 21 bp, Homo sapiens
caattaagtcygtgaaatctt

SEQ ID NO: 11166 - DNA, 21 bp, Homo sapiens
cttcaatataygttcacaaat

SEQ ID NO: 11167 - DNA, 21 bp, Homo sapiens
ctatttgattmaacctccagc

SEQ ID NO: 11168 - DNA, 21 bp, Homo sapiens
tacttatatcrtatctaaacc

SEQ ID NO: 11169 - DNA, 21 bp, Homo sapiens
agaaactgttycctaaagcct

SEQ ID NO: 11170 - DNA, 21 bp, Homo sapiens
ctttatagaakgtaatagttg

SEQ ID NO: 11171 - DNA, 21 bp, Homo sapiens
accttcactgmttggttaagg

SEQ ID NO: 11172 - DNA, 21 bp, Homo sapiens
atttacacacrcatgcattct

SEQ ID NO: 11173 - DNA, 21 bp, Homo sapiens
aacgtgcaacmtgaaatccta

SEQ ID NO: 11174 - DNA, 21 bp, Homo sapiens
gtgtctgttayagtaattgtg

SEQ ID NO: 11175 - DNA, 21 bp, Homo sapiens
actagaattasaaataggctc

SEQ ID NO: 11176 - DNA, 21 bp, Homo sapiens
aggttgcttayaaattgaatc

SEQ ID NO: 11177 - DNA, 21 bp, Homo sapiens
gattttaggtyaccttgtgtt

SEQ ID NO: 11178 - DNA, 21 bp, Homo sapiens
tgaatacctgmgtcataccac

SEQ ID NO: 11179 - DNA, 21 bp, Homo sapiens
gtctttaataktttctggcaa

SEQ ID NO: 11180 - DNA, 21 bp, Homo sapiens
tctgtcttggycagtattttc

SEQ ID NO: 11181 - DNA, 21 bp, Homo sapiens
tttaatgtctrtaaaaagtcc

SEQ ID NO: 11182 - DNA, 21 bp, Homo sapiens
attgaggccamaaagctcctg

SEQ ID NO: 11183 - DNA, 21 bp, Homo sapiens
gaaagatgaaragttgtgaaa

SEQ ID NO: 11184 - DNA, 21 bp, Homo sapiens
tctgaaagacrccaaaagaat

SEQ ID NO: 11185 - DNA, 21 bp, Homo sapiens
gctctggattyccaagtaaac

SEQ ID NO: 11186 - DNA, 21 bp, Homo sapiens
agtaacatttwgtaagtgatt

SEQ ID NO: 11187 - DNA, 21 bp, Homo sapiens
gtcagcaagcytggaaggaaa

SEQ ID NO: 11188 - DNA, 21 bp, Homo sapiens
tggactcacaratacatttaa

SEQ ID NO: 11189 - DNA, 21 bp, Homo sapiens
tgtgtcagaawtctataatgt

SEQ ID NO: 11190 - DNA, 21 bp, Homo sapiens
cagacactctrctcaaagggt

SEQ ID NO: 11191 - DNA, 21 bp, Homo sapiens
aatcatgtgarataggaaagt

SEQ ID NO: 11192 - DNA, 21 bp, Homo sapiens
ctgatttaatmcttgctgcct

SEQ ID NO: 11193 - DNA, 21 bp, Homo sapiens
cttcctgctayaatttttggc

SEQ ID NO: 11194 - DNA, 21 bp, Homo sapiens
gccttcctctytgggcaactt

SEQ ID NO: 11195 - DNA, 21 bp, Homo sapiens
aatcacagttmaattcacaca

SEQ ID NO: 11196 - DNA, 21 bp, Homo sapiens
cgagagatacyggtcaggagc

SEQ ID NO: 11197 - DNA, 21 bp, Homo sapiens
agagctcctayagttctccca

SEQ ID NO: 11198 - DNA, 21 bp, Homo sapiens
ggtgatcggcrcaccctacat

SEQ ID NO: 11199 - DNA, 21 bp, Homo sapiens
tctctgagccrcaagataaac

SEQ ID NO: 11200 - DNA, 21 bp, Homo sapiens
ataagtggctycttcaatctg

SEQ ID NO: 11201 - DNA, 21 bp, Homo sapiens
catctcataaygtggacagct

SEQ ID NO: 11202 - DNA, 21 bp, Homo sapiens
actcactctasttgactccaa

SEQ ID NO: 11203 - DNA, 21 bp, Homo sapiens
gctcactagasaatgttttcc

SEQ ID NO: 11204 - DNA, 21 bp, Homo sapiens
tcataccttarcagcataatg

SEQ ID NO: 11205 - DNA, 21 bp, Homo sapiens
ttagattgtcygagctatagt

SEQ ID NO: 11206 - DNA, 21 bp, Homo sapiens
taattggccaytgggtagata

SEQ ID NO: 11207 - DNA, 21 bp, Homo sapiens
ctacatattargcctggatct

SEQ ID NO: 11208 - DNA, 21 bp, Homo sapiens
ctgcctgcccrtggcttcttc

SEQ ID NO: 11209 - DNA, 21 bp, Homo sapiens
atgagcactawgtgcagtgtg

SEQ ID NO: 11210 - DNA, 21 bp, Homo sapiens
ttacagacacrgtatatctcc

SEQ ID NO: 11211 - DNA, 21 bp, Homo sapiens
tttccttgaaygcatgtgttt

SEQ ID NO: 11212 - DNA, 21 bp, Homo sapiens
aagaatctgtrttcctgttga

SEQ ID NO: 11213 - DNA, 21 bp, Homo sapiens
tttactgggtygtaccttttg

SEQ ID NO: 11214 - DNA, 21 bp, Homo sapiens
taactaacacytttatcttta

SEQ ID NO: 11215 - DNA, 21 bp, Homo sapiens
cccaggcaaaycgaaaaggct

SEQ ID NO: 11216 - DNA, 21 bp, Homo sapiens
caggatgatcyggagaaaaca

SEQ ID NO: 11217 - DNA, 21 bp, Homo sapiens
cctgggagacrtaaaggagtt

SEQ ID NO: 11218 - DNA, 21 bp, Homo sapiens
gcacaatgtcrgaggccttga

SEQ ID NO: 11219 - DNA, 21 bp, Homo sapiens
accctgtcaaytaaactatga

SEQ ID NO: 11220 - DNA, 21 bp, Homo sapiens
atttcccacargtagaccggt

SEQ ID NO: 11221 - DNA, 21 bp, Homo sapiens
tccttctgttsttcagggaaa

SEQ ID NO: 11222 - DNA, 21 bp, Homo sapiens
tggagttagtrgcctgcaatg

SEQ ID NO: 11223 - DNA, 21 bp, Homo sapiens
tgttgaatcarttgttgagct

SEQ ID NO: 11224 - DNA, 21 bp, Homo sapiens
ctcttctgaayagtacttctc

SEQ ID NO: 11225 - DNA, 21 bp, Homo sapiens
gaaatgacagrcacctagaat

SEQ ID NO: 11226 - DNA, 21 bp, Homo sapiens
gcagaaaccayaccaataaaa

SEQ ID NO: 11227 - DNA, 21 bp, Homo sapiens
aatggtagcasttggtactaa

SEQ ID NO: 11228 - DNA, 21 bp, Homo sapiens
agattcagacmgcagggacgt

SEQ ID NO: 11229 - DNA, 21 bp, Homo sapiens
tctctgttacrcggggtggct

SEQ ID NO: 11230 - DNA, 21 bp, Homo sapiens
atggccacaaktaatgctttc

SEQ ID NO: 11231 - DNA, 21 bp, Homo sapiens
atatcacggargaaaagctcc

SEQ ID NO: 11232 - DNA, 21 bp, Homo sapiens
atgaggtatargctgcactcc

SEQ ID NO: 11233 - DNA, 21 bp, Homo sapiens
agtattttggractggatgca

SEQ ID NO: 11234 - DNA, 21 bp, Homo sapiens
taatctctaakggaaatctcc

SEQ ID NO: 11235 - DNA, 21 bp, Homo sapiens
aaaatatgacwttttgctgaa

SEQ ID NO: 11236 - DNA, 21 bp, Homo sapiens
gtcttgccaayggcctggttt

SEQ ID NO: 11237 - DNA, 21 bp, Homo sapiens
attttcattcygttaattact

SEQ ID NO: 11238 - DNA, 21 bp, Homo sapiens
ttgagagaaargccgtcagtg

SEQ ID NO: 11239 - DNA, 21 bp, Homo sapiens
aagaagagacmatcaaaaaag

SEQ ID NO: 11240 - DNA, 21 bp, Homo sapiens
actttaagaaytcctttttgt

SEQ ID NO: 11241 - DNA, 21 bp, Homo sapiens
catgcctttastcacagagag

SEQ ID NO: 11242 - DNA, 21 bp, Homo sapiens
tagttgtgcayctgtggcacc

SEQ ID NO: 11243 - DNA, 21 bp, Homo sapiens
tagtaaagttmtgagagattt

SEQ ID NO: 11244 - DNA, 21 bp, Homo sapiens
agtttctcccrttgtctgatg

SEQ ID NO: 11245 - DNA, 21 bp, Homo sapiens
cttcctcctgrtgttcaattc

SEQ ID NO: 11246 - DNA, 21 bp, Homo sapiens
agcaggtctcrtaagtactga

SEQ ID NO: 11247 - DNA, 21 bp, Homo sapiens
ataacaatcastgctgtttgg

SEQ ID NO: 11248 - DNA, 21 bp, Homo sapiens
ttactcctgaraactatatgg

SEQ ID NO: 11249 - DNA, 21 bp, Homo sapiens
ccaacctcagygtcatgccag

SEQ ID NO: 11250 - DNA, 21 bp, Homo sapiens
cattctaagasacaagaaaga

SEQ ID NO: 11251 - DNA, 21 bp, Homo sapiens
ggaatcagtcyctagagctcc

SEQ ID NO: 11252 - DNA, 21 bp, Homo sapiens
ataaacaaacwggtcaaggga

SEQ ID NO: 11253 - DNA, 21 bp, Homo sapiens
tttagtgatgkttgggcacaa

SEQ ID NO: 11254 - DNA, 21 bp, Homo sapiens
ctcttcaaggygtggtacaag

SEQ ID NO: 11255 - DNA, 21 bp, Homo sapiens
ttgagtcctcrctctgatcca

SEQ ID NO: 11256 - DNA, 21 bp, Homo sapiens
gcagtaacagkaaacccaaca

SEQ ID NO: 11257 - DNA, 21 bp, Homo sapiens
tctccatccaytttgctggct

SEQ ID NO: 11258 - DNA, 21 bp, Homo sapiens
tttgatagtayggctgaatca

SEQ ID NO: 11259 - DNA, 21 bp, Homo sapiens
gttggccttcratcctctagc

SEQ ID NO: 11260 - DNA, 21 bp, Homo sapiens
cactatttcartcatggccta

SEQ ID NO: 11261 - DNA, 21 bp, Homo sapiens
catgatgacartcagtgatca

SEQ ID NO: 11262 - DNA, 21 bp, Homo sapiens
gtggacactcyatttgacggc

SEQ ID NO: 11263 - DNA, 21 bp, Homo sapiens
atagaaataastttttattgc

SEQ ID NO: 11264 - DNA, 21 bp, Homo sapiens
catctgttccyaggctggttg

SEQ ID NO: 11265 - DNA, 21 bp, Homo sapiens
gtcatgcacckagttgatggt

SEQ ID NO: 11266 - DNA, 21 bp, Homo sapiens
cattgtgtctwtggtgattaa

SEQ ID NO: 11267 - DNA, 21 bp, Homo sapiens
tgcagttccaygtctcagtgt

SEQ ID NO: 11268 - DNA, 21 bp, Homo sapiens
gctccatacayctgccatttt

SEQ ID NO: 11269 - DNA, 21 bp, Homo sapiens
acaccctttcrgagcaaagta

SEQ ID NO: 11270 - DNA, 21 bp, Homo sapiens
atggagtaaaygcttaaactg

SEQ ID NO: 11271 - DNA, 21 bp, Homo sapiens
ttttgtcctcygtgcctgaaa

SEQ ID NO: 11272 - DNA, 21 bp, Homo sapiens
aagctgtaatmtctgaggaga

SEQ ID NO: 11273 - DNA, 21 bp, Homo sapiens
ggagttaaagrgacttgaatt

SEQ ID NO: 11274 - DNA, 21 bp, Homo sapiens
tcactctccarctgttcacct

SEQ ID NO: 11275 - DNA, 21 bp, Homo sapiens
gaggctcaaargcacataaaa

SEQ ID NO: 11276 - DNA, 21 bp, Homo sapiens
ctttttagttytcctgtttca

SEQ ID NO: 11277 - DNA, 21 bp, Homo sapiens
acatggtcttyttggaatgct

SEQ ID NO: 11278 - DNA, 21 bp, Homo sapiens
tgtccttaaarcaaatgggaa

SEQ ID NO: 11279 - DNA, 21 bp, Homo sapiens
agaccgggctsgttcactagt

SEQ ID NO: 11280 - DNA, 21 bp, Homo sapiens
ttggtaatcarctcaactaga

SEQ ID NO: 11281 - DNA, 21 bp, Homo sapiens
ttgatggaggktagatgtcca

SEQ ID NO: 11282 - DNA, 21 bp, Homo sapiens
gactgttggcraaagagtcac

SEQ ID NO: 11283 - DNA, 21 bp, Homo sapiens
ttttgcctgcstgcttgaggc

SEQ ID NO: 11284 - DNA, 21 bp, Homo sapiens
aaatgacattwgacttttcaa

SEQ ID NO: 11285 - DNA, 21 bp, Homo sapiens
ttgaaagttarttattggact

SEQ ID NO: 11286 - DNA, 21 bp, Homo sapiens
tctggatatayttaccataga

SEQ ID NO: 11287 - DNA, 21 bp, Homo sapiens
agttcatggargagcagctat

SEQ ID NO: 11288 - DNA, 21 bp, Homo sapiens
agtaactatgsctgaaaaaat

SEQ ID NO: 11289 - DNA, 21 bp, Homo sapiens
ttggaaaataktttgtatggc

SEQ ID NO: 11290 - DNA, 21 bp, Homo sapiens
ataataaccayccacacctga

SEQ ID NO: 11291 - DNA, 21 bp, Homo sapiens
ggaatgaccamcttgttttta

SEQ ID NO: 11292 - DNA, 21 bp, Homo sapiens
actagagttcrtttcatttag

SEQ ID NO: 11293 - DNA, 21 bp, Homo sapiens
tctggtaacarttttgcagtt

SEQ ID NO: 11294 - DNA, 21 bp, Homo sapiens
tgccatttatygacaaaatga

SEQ ID NO: 11295 - DNA, 21 bp, Homo sapiens
aggtacaaagrcatacaagag

SEQ ID NO: 11296 - DNA, 21 bp, Homo sapiens
tcctcaatgcyaaagtttagg

SEQ ID NO: 11297 - DNA, 21 bp, Homo sapiens
ctatcaaccargtactgttta

SEQ ID NO: 11298 - DNA, 21 bp, Homo sapiens
gagaggaagtraaaattgcat

SEQ ID NO: 11299 - DNA, 21 bp, Homo sapiens
tatacgtcccrgtctcttctc

SEQ ID NO: 11300 - DNA, 21 bp, Homo sapiens
aaacaaacgawcccactcgta

SEQ ID NO: 11301 - DNA, 21 bp, Homo sapiens
ggtgggactaraaaatgtact

SEQ ID NO: 11302 - DNA, 21 bp, Homo sapiens
cttaggcactygtggtctgtt

SEQ ID NO: 11303 - DNA, 21 bp, Homo sapiens
agtcagggcaraggatccagg

SEQ ID NO: 11304 - DNA, 21 bp, Homo sapiens
aaaatttcctrttgtccgtgt

SEQ ID NO: 11305 - DNA, 21 bp, Homo sapiens
atctccctgtratctagatct

SEQ ID NO: 11306 - DNA, 21 bp, Homo sapiens
gctgttagccrttgtggatta

SEQ ID NO: 11307 - DNA, 21 bp, Homo sapiens
aactctgtcamggatattagg

SEQ ID NO: 11308 - DNA, 21 bp, Homo sapiens
actgtaagagkgaactcctat

SEQ ID NO: 11309 - DNA, 21 bp, Homo sapiens
tgtttcctackcagctatttt

SEQ ID NO: 11310 - DNA, 21 bp, Homo sapiens
gatgctacccyggggatcaag

SEQ ID NO: 11311 - DNA, 21 bp, Homo sapiens
tacaatcagaygcctattttc

SEQ ID NO: 11312 - DNA, 21 bp, Homo sapiens
ccctatgtgtycttatctgca

SEQ ID NO: 11313 - DNA, 21 bp, Homo sapiens
caatgttgaayggagcatcat

SEQ ID NO: 11314 - DNA, 21 bp, Homo sapiens
ctgggaaaggmacttcttttt

SEQ ID NO: 11315 - DNA, 21 bp, Homo sapiens
tagtttccacraagactctgg

SEQ ID NO: 11316 - DNA, 21 bp, Homo sapiens
catgggttctrgatcttgctc

SEQ ID NO: 11317 - DNA, 21 bp, Homo sapiens
ctgatcatacytaatcttctc

SEQ ID NO: 11318 - DNA, 21 bp, Homo sapiens
cttgcatctgstaagacgtta

SEQ ID NO: 11319 - DNA, 21 bp, Homo sapiens
taataagtagygtggatataa

SEQ ID NO: 11320 - DNA, 21 bp, Homo sapiens
ctatccttctycaaagagctt

SEQ ID NO: 11321 - DNA, 21 bp, Homo sapiens
cacaataacawcttgggaata

SEQ ID NO: 11322 - DNA, 21 bp, Homo sapiens
gaaaaaatctraacactatat

SEQ ID NO: 11323 - DNA, 21 bp, Homo sapiens
taactgattgyagacaaactt

SEQ ID NO: 11324 - DNA, 21 bp, Homo sapiens
tcatgtagggrgtaatcacta

SEQ ID NO: 11325 - DNA, 21 bp, Homo sapiens
gcttccctggrcagcagcact

SEQ ID NO: 11326 - DNA, 21 bp, Homo sapiens
cccggttattkcttggtgttg

SEQ ID NO: 11327 - DNA, 21 bp, Homo sapiens
tccaagggttytatggattgg

SEQ ID NO: 11328 - DNA, 21 bp, Homo sapiens
cctgctgcctrcatttttcct

SEQ ID NO: 11329 - DNA, 21 bp, Homo sapiens
gaggaggtagyagttttctga

SEQ ID NO: 11330 - DNA, 21 bp, Homo sapiens
tctccagcatkttcttttcat

SEQ ID NO: 11331 - DNA, 21 bp, Homo sapiens
gagctgttaaytggctggtga

SEQ ID NO: 11332 - DNA, 21 bp, Homo sapiens
agaggacgcakaggcacactg

SEQ ID NO: 11333 - DNA, 21 bp, Homo sapiens
atctaaaggarggttgatgga

SEQ ID NO: 11334 - DNA, 21 bp, Homo sapiens
cggatcaggcracatttcaca

SEQ ID NO: 11335 - DNA, 21 bp, Homo sapiens
attgctgcatygtgtggtaag

SEQ ID NO: 11336 - DNA, 21 bp, Homo sapiens
aatgaatgaascccctcaact

SEQ ID NO: 11337 - DNA, 21 bp, Homo sapiens
ttatctgaacyggttcttgaa

SEQ ID NO: 11338 - DNA, 21 bp, Homo sapiens
tgaacattggytgggcgcggt

SEQ ID NO: 11339 - DNA, 21 bp, Homo sapiens
attgaaacaaygttaagactt

SEQ ID NO: 11340 - DNA, 21 bp, Homo sapiens
aaatactcttrgagagccatg

SEQ ID NO: 11341 - DNA, 21 bp, Homo sapiens
ttcttttcagytctgactctc

SEQ ID NO: 11342 - DNA, 21 bp, Homo sapiens
ttcaggtctcyttccagagga

SEQ ID NO: 11343 - DNA, 21 bp, Homo sapiens
ctccacttctsttccttttgt

SEQ ID NO: 11344 - DNA, 21 bp, Homo sapiens
ctctttgccgygaggcatttt

SEQ ID NO: 11345 - DNA, 21 bp, Homo sapiens
tatcaagtgtygtgtgtcatc

SEQ ID NO: 11346 - DNA, 21 bp, Homo sapiens
tatgtcactgrttaattttga

SEQ ID NO: 11347 - DNA, 21 bp, Homo sapiens
caagagcaatrgccgtacctc

SEQ ID NO: 11348 - DNA, 21 bp, Homo sapiens
ggctgttcttygcggagaacg

SEQ ID NO: 11349 - DNA, 21 bp, Homo sapiens
cggagcagggyccactgagtc

SEQ ID NO: 11350 - DNA, 21 bp, Homo sapiens
ttcaaatcgtrttgcacacct

SEQ ID NO: 11351 - DNA, 21 bp, Homo sapiens
acaaaaatgaytgctggtgtc

SEQ ID NO: 11352 - DNA, 21 bp, Homo sapiens
ttttacagacrcaaaagctca

SEQ ID NO: 11353 - DNA, 21 bp, Homo sapiens
gtttgtcagtsgcctgttgcc

SEQ ID NO: 11354 - DNA, 21 bp, Homo sapiens
ctccaccttcrggcacagagg

SEQ ID NO: 11355 - DNA, 21 bp, Homo sapiens
tgggaggtaartcctttctgc

SEQ ID NO: 11356 - DNA, 21 bp, Homo sapiens
gagagcacacrggttgcccca

SEQ ID NO: 11357 - DNA, 21 bp, Homo sapiens
tctatgagcaracaaaggagg

SEQ ID NO: 11358 - DNA, 21 bp, Homo sapiens
taagaacatcrtctttcaaaa

SEQ ID NO: 11359 - DNA, 21 bp, Homo sapiens
ttcacattttrtaggagaccc

SEQ ID NO: 11360 - DNA, 21 bp, Homo sapiens
tactgcattcrttaatgttcg

SEQ ID NO: 11361 - DNA, 21 bp, Homo sapiens
taattaagaartcacctggca

SEQ ID NO: 11362 - DNA, 21 bp, Homo sapiens
aaatataagcrtagagatgat

SEQ ID NO: 11363 - DNA, 21 bp, Homo sapiens
ttgttaaactrcacggtgaat

SEQ ID NO: 11364 - DNA, 21 bp, Homo sapiens
ctgtgcgtctyagccaagtgt

SEQ ID NO: 11365 - DNA, 21 bp, Homo sapiens
gacaggaaagmagtgccgacg

SEQ ID NO: 11366 - DNA, 21 bp, Homo sapiens
tattaaagctrgaggtgtttg

SEQ ID NO: 11367 - DNA, 21 bp, Homo sapiens
ctttgtcttamcatcctgact

SEQ ID NO: 11368 - DNA, 21 bp, Homo sapiens
caaggctatcmtcatatttgc

SEQ ID NO: 11369 - DNA, 21 bp, Homo sapiens
ctctgtttacwttgctgctta

SEQ ID NO: 11370 - DNA, 21 bp, Homo sapiens
gcaggatgacmcatggcccgc

SEQ ID NO: 11371 - DNA, 21 bp, Homo sapiens
ggggacacccractgagacaa

SEQ ID NO: 11372 - DNA, 21 bp, Homo sapiens
tctctttcagyccctttttgt

SEQ ID NO: 11373 - DNA, 21 bp, Homo sapiens
tacagacgctsacagaataga

SEQ ID NO: 11374 - DNA, 21 bp, Homo sapiens
gctgagctctkccttctgaaa

SEQ ID NO: 11375 - DNA, 21 bp, Homo sapiens
aaattacaagrtataactttt

SEQ ID NO: 11376 - DNA, 21 bp, Homo sapiens
ctattgagtascttatagtca

SEQ ID NO: 11377 - DNA, 21 bp, Homo sapiens
tgtgcaaatcrtgtgattagt

SEQ ID NO: 11378 - DNA, 21 bp, Homo sapiens
tttcccaagayagttctgtaa

SEQ ID NO: 11379 - DNA, 21 bp, Homo sapiens
aaactgctctsttgggtgact

SEQ ID NO: 11380 - DNA, 21 bp, Homo sapiens
ttgtatcttaygtatctatta

SEQ ID NO: 11381 - DNA, 21 bp, Homo sapiens
aattctgacgrttctctaccc

SEQ ID NO: 11382 - DNA, 21 bp, Homo sapiens
aaggaaaaagygccctgccag

SEQ ID NO: 11383 - DNA, 21 bp, Homo sapiens
gtgctacttarcagatgtgtt

SEQ ID NO: 11384 - DNA, 21 bp, Homo sapiens
cactgttgggyttgctgtcag

SEQ ID NO: 11385 - DNA, 21 bp, Homo sapiens
atgaataaaaygagtgctgtg

SEQ ID NO: 11386 - DNA, 21 bp, Homo sapiens
ttgaagtagasaagtcaatct

SEQ ID NO: 11387 - DNA, 21 bp, Homo sapiens
aaaaatagttygggaaaattg

SEQ ID NO: 11388 - DNA, 21 bp, Homo sapiens
tatttacttcmaagaggacac

SEQ ID NO: 11389 - DNA, 21 bp, Homo sapiens
tataagcttawacgcctaact

SEQ ID NO: 11390 - DNA, 21 bp, Homo sapiens
gatattagttkttcatgagag

SEQ ID NO: 11391 - DNA, 21 bp, Homo sapiens
attagctaccrtcctagagta

SEQ ID NO: 11392 - DNA, 21 bp, Homo sapiens
tatttggctgycttatccact

SEQ ID NO: 11393 - DNA, 21 bp, Homo sapiens
aggtactccayagaaacacag

SEQ ID NO: 11394 - DNA, 21 bp, Homo sapiens
gagccatatamaatgcctatg

SEQ ID NO: 11395 - DNA, 21 bp, Homo sapiens
gcacactataygacaaaaaaa

SEQ ID NO: 11396 - DNA, 21 bp, Homo sapiens
ttcagccaatrcatcaatttc

SEQ ID NO: 11397 - DNA, 21 bp, Homo sapiens
gagggccgtartttttatgtc

SEQ ID NO: 11398 - DNA, 21 bp, Homo sapiens
gtttttacacyagagttttga

SEQ ID NO: 11399 - DNA, 21 bp, Homo sapiens
agcactgggayaagtatcaac

SEQ ID NO: 11400 - DNA, 21 bp, Homo sapiens
caataccacaraatgtcgtaa

SEQ ID NO: 11401 - DNA, 21 bp, Homo sapiens
ccacttttcayaagaattgaa

SEQ ID NO: 11402 - DNA, 21 bp, Homo sapiens
tgtgattttgytaattgccca

SEQ ID NO: 11403 - DNA, 21 bp, Homo sapiens
ctctacctacrcatcccacag

SEQ ID NO: 11404 - DNA, 21 bp, Homo sapiens
gtggattaccyacaacgtaaa

SEQ ID NO: 11405 - DNA, 21 bp, Homo sapiens
ttccaattagytcctttttat

SEQ ID NO: 11406 - DNA, 21 bp, Homo sapiens
tctaaaaaggycaggcaatag

SEQ ID NO: 11407 - DNA, 21 bp, Homo sapiens
ctaagccccayagatgtaagc

SEQ ID NO: 11408 - DNA, 21 bp, Homo sapiens
caatttcaatwtttttatgat

SEQ ID NO: 11409 - DNA, 21 bp, Homo sapiens
acacctctacyggaagaaaac

SEQ ID NO: 11410 - DNA, 21 bp, Homo sapiens
taaagaggcckgtaccatttt

SEQ ID NO: 11411 - DNA, 21 bp, Homo sapiens
tgagatgagcytttcacctcc

SEQ ID NO: 11412 - DNA, 21 bp, Homo sapiens
aaatgaaatcrgtacaggttg

SEQ ID NO: 11413 - DNA, 21 bp, Homo sapiens
tatctaattgytgaccaccca

SEQ ID NO: 11414 - DNA, 21 bp, Homo sapiens
tacatctcaaratcatgccat

SEQ ID NO: 11415 - DNA, 21 bp, Homo sapiens
aaaacaccttygtcttgagat

SEQ ID NO: 11416 - DNA, 21 bp, Homo sapiens
acagtgctttktcagtgctgg

SEQ ID NO: 11417 - DNA, 21 bp, Homo sapiens
agtggtctgckttataccagc

SEQ ID NO: 11418 - DNA, 21 bp, Homo sapiens
atcttggggtratataacctg

SEQ ID NO: 11419 - DNA, 21 bp, Homo sapiens
aatctgagacrctcattaact

SEQ ID NO: 11420 - DNA, 21 bp, Homo sapiens
atcaaatcttwcttatgcttg

SEQ ID NO: 11421 - DNA, 21 bp, Homo sapiens
ttgaatatacmagaccagtgc

SEQ ID NO: 11422 - DNA, 21 bp, Homo sapiens
gatggacatgytttgtctgat

SEQ ID NO: 11423 - DNA, 21 bp, Homo sapiens
aatgtgaaaamcttatgaagg

SEQ ID NO: 11424 - DNA, 21 bp, Homo sapiens
attttcacctycctgactcat

SEQ ID NO: 11425 - DNA, 21 bp, Homo sapiens
gttgtgtaacrgatgattgtg

SEQ ID NO: 11426 - DNA, 21 bp, Homo sapiens
cgaaagaattstcttgatctg

SEQ ID NO: 11427 - DNA, 21 bp, Homo sapiens
tgtatacagaktgctttcaaa

SEQ ID NO: 11428 - DNA, 21 bp, Homo sapiens
gggacattggyttttattatg

SEQ ID NO: 11429 - DNA, 21 bp, Homo sapiens
ctttgtaatgwtatactggaa

SEQ ID NO: 11430 - DNA, 21 bp, Homo sapiens
cgtattctagyttctctgcct

SEQ ID NO: 11431 - DNA, 21 bp, Homo sapiens
gtcagcatttsaagtgaatta

SEQ ID NO: 11432 - DNA, 21 bp, Homo sapiens
tgcatcaagamgtcaaaaact

SEQ ID NO: 11433 - DNA, 21 bp, Homo sapiens
agcttaacaayttgtgaaaca

SEQ ID NO: 11434 - DNA, 21 bp, Homo sapiens
tctcactgtgmattcaatcaa

SEQ ID NO: 11435 - DNA, 21 bp, Homo sapiens
cttaaccctgyatttactgat

SEQ ID NO: 11436 - DNA, 21 bp, Homo sapiens
tcactttatayccctgttcta

SEQ ID NO: 11437 - DNA, 21 bp, Homo sapiens
acctgccatcygctgttgggt

SEQ ID NO: 11438 - DNA, 21 bp, Homo sapiens
ataaaaaccarttctagcaaa

SEQ ID NO: 11439 - DNA, 21 bp, Homo sapiens
gaatagattaygaagaaagtg

SEQ ID NO: 11440 - DNA, 21 bp, Homo sapiens
cactgccttgraagagaaata

SEQ ID NO: 11441 - DNA, 21 bp, Homo sapiens
tagaaaatcarttaaggcatc

SEQ ID NO: 11442 - DNA, 21 bp, Homo sapiens
gctttttattmtgcaagctgt

SEQ ID NO: 11443 - DNA, 21 bp, Homo sapiens
acccattgtgrgcctcatcct

SEQ ID NO: 11444 - DNA, 21 bp, Homo sapiens
tactggaaackggtgggttta

SEQ ID NO: 11445 - DNA, 21 bp, Homo sapiens
tcaccattgcygctccatcat

SEQ ID NO: 11446 - DNA, 21 bp, Homo sapiens
cacacataatrcctcctttta

SEQ ID NO: 11447 - DNA, 21 bp, Homo sapiens
ggagaagagtyttctagaacc

SEQ ID NO: 11448 - DNA, 21 bp, Homo sapiens
tactcaggcayacagtgttcg

SEQ ID NO: 11449 - DNA, 21 bp, Homo sapiens
cccaaatatcracttgtttaa

SEQ ID NO: 11450 - DNA, 21 bp, Homo sapiens
ggtctcaagasagaaaattga

SEQ ID NO: 11451 - DNA, 21 bp, Homo sapiens
ggtatgctacragtttattga

SEQ ID NO: 11452 - DNA, 21 bp, Homo sapiens
aatgtgtatgrtccagaaaca

SEQ ID NO: 11453 - DNA, 21 bp, Homo sapiens
gctaaaaaaartttcctttcc

SEQ ID NO: 11454 - DNA, 21 bp, Homo sapiens
acattcatttygcccctggac

SEQ ID NO: 11455 - DNA, 21 bp, Homo sapiens
gcacctaaaamcatcccaaga

SEQ ID NO: 11456 - DNA, 21 bp, Homo sapiens
tccttaggccractccaacca

SEQ ID NO: 11457 - DNA, 21 bp, Homo sapiens
gccttttccarccgtgatcca

SEQ ID NO: 11458 - DNA, 21 bp, Homo sapiens
gagggtgaatyggggaagact

SEQ ID NO: 11459 - DNA, 21 bp, Homo sapiens
agcagacttaycaagtactat

SEQ ID NO: 11460 - DNA, 21 bp, Homo sapiens
caggtttaccyagaggagaac

SEQ ID NO: 11461 - DNA, 21 bp, Homo sapiens
aaaaaagaatyatgggcgaat

SEQ ID NO: 11462 - DNA, 21 bp, Homo sapiens
gcgtttaatgkctggtgactt

SEQ ID NO: 11463 - DNA, 21 bp, Homo sapiens
catagtgggcmcagaggagag

SEQ ID NO: 11464 - DNA, 21 bp, Homo sapiens
tttcaaaaagsctatatctta

SEQ ID NO: 11465 - DNA, 21 bp, Homo sapiens
gttagggcttyctaaatgttc

SEQ ID NO: 11466 - DNA, 21 bp, Homo sapiens
tacgtggaccrggctgtgcgg

SEQ ID NO: 11467 - DNA, 21 bp, Homo sapiens
tgcaatttggrtgaaattaac

SEQ ID NO: 11468 - DNA, 21 bp, Homo sapiens
acattcatcamcccaccattc

SEQ ID NO: 11469 - DNA, 21 bp, Homo sapiens
aatacaggctscattcttttt

SEQ ID NO: 11470 - DNA, 21 bp, Homo sapiens
tcagtaggaayagagagtgat

SEQ ID NO: 11471 - DNA, 21 bp, Homo sapiens
caatgaaagayatgatagtaa

SEQ ID NO: 11472 - DNA, 21 bp, Homo sapiens
tctactgtcaytatcattcta

SEQ ID NO: 11473 - DNA, 21 bp, Homo sapiens
ccagataaggwgtcactggat

SEQ ID NO: 11474 - DNA, 21 bp, Homo sapiens
ttaagacatartcaggccatt

SEQ ID NO: 11475 - DNA, 21 bp, Homo sapiens
gtgtacaagasagaaattctt

SEQ ID NO: 11476 - DNA, 21 bp, Homo sapiens
ttttcaagctwtccttatttg

SEQ ID NO: 11477 - DNA, 21 bp, Homo sapiens
acagtttctakttcctcctga

SEQ ID NO: 11478 - DNA, 21 bp, Homo sapiens
tgtaccaatartgtgaaaagt

SEQ ID NO: 11479 - DNA, 21 bp, Homo sapiens
ttctgaattgygtttacctgt

SEQ ID NO: 11480 - DNA, 21 bp, Homo sapiens
agttacatgcwtttgtgtcga

SEQ ID NO: 11481 - DNA, 21 bp, Homo sapiens
tgaactatcamaagcaagata

SEQ ID NO: 11482 - DNA, 21 bp, Homo sapiens
gattattccamgcttgcattt

SEQ ID NO: 11483 - DNA, 21 bp, Homo sapiens
ggtaaactgarctgggtatga

SEQ ID NO: 11484 - DNA, 21 bp, Homo sapiens
attgaacattktcttttcatt

SEQ ID NO: 11485 - DNA, 21 bp, Homo sapiens
agggcattgtrgaagcattat

SEQ ID NO: 11486 - DNA, 21 bp, Homo sapiens
tcttttttaartaggctagta

SEQ ID NO: 11487 - DNA, 21 bp, Homo sapiens
ttaatgagagyatgcagtggt

SEQ ID NO: 11488 - DNA, 21 bp, Homo sapiens
tggcatgactsctgctggcct

SEQ ID NO: 11489 - DNA, 21 bp, Homo sapiens
tttatagacaytatacatacg

SEQ ID NO: 11490 - DNA, 21 bp, Homo sapiens
tagttagtacrcagagtgagt

SEQ ID NO: 11491 - DNA, 21 bp, Homo sapiens
ctctttgcccrtcccatttct

SEQ ID NO: 11492 - DNA, 21 bp, Homo sapiens
tattttccagytatgttggtt

SEQ ID NO: 11493 - DNA, 21 bp, Homo sapiens
cctgattaaartgagtcttag

SEQ ID NO: 11494 - DNA, 21 bp, Homo sapiens
cattactgttkaaatcgatgc

SEQ ID NO: 11495 - DNA, 21 bp, Homo sapiens
tttttgcaacwtgctctaaaa

SEQ ID NO: 11496 - DNA, 21 bp, Homo sapiens
caatcaagaartaaaaattag

SEQ ID NO: 11497 - DNA, 21 bp, Homo sapiens
ccagtcattcytgttccagat

SEQ ID NO: 11498 - DNA, 21 bp, Homo sapiens
agttattctcrtgatcgcaga

SEQ ID NO: 11499 - DNA, 21 bp, Homo sapiens
ttgacaaaaartctccagtct

SEQ ID NO: 11500 - DNA, 21 bp, Homo sapiens
agcagagatarcatatatcgt

SEQ ID NO: 11501 - DNA, 21 bp, Homo sapiens
attcacttacrtgatgtaact

SEQ ID NO: 11502 - DNA, 21 bp, Homo sapiens
gtttattctgrgatgctactt

SEQ ID NO: 11503 - DNA, 21 bp, Homo sapiens
ctcataatggyagcgtccgga

SEQ ID NO: 11504 - DNA, 21 bp, Homo sapiens
tgttggaaaaygcctgtgctg

SEQ ID NO: 11505 - DNA, 21 bp, Homo sapiens
gtgcttccagytgggctaagt

SEQ ID NO: 11506 - DNA, 21 bp, Homo sapiens
ttgcttattcygagaaatttt

SEQ ID NO: 11507 - DNA, 21 bp, Homo sapiens
gagtatatgcrgagaagcagc

SEQ ID NO: 11508 - DNA, 21 bp, Homo sapiens
caggccttggycctctagcta

SEQ ID NO: 11509 - DNA, 21 bp, Homo sapiens
atgatggctgrctaggacttt

SEQ ID NO: 11510 - DNA, 21 bp, Homo sapiens
gaaaagattayttgttaacag

SEQ ID NO: 11511 - DNA, 21 bp, Homo sapiens
gttacagataycactttgaag

SEQ ID NO: 11512 - DNA, 21 bp, Homo sapiens
ccttaccttcrccagggctaa

SEQ ID NO: 11513 - DNA, 21 bp, Homo sapiens
acgttttacayttgaagcact

SEQ ID NO: 11514 - DNA, 21 bp, Homo sapiens
ccatctaggakactctggatt

SEQ ID NO: 11515 - DNA, 21 bp, Homo sapiens
tgacaaggtcytggttggtgc

SEQ ID NO: 11516 - DNA, 21 bp, Homo sapiens
tcagagaaaaktggtaattgc

SEQ ID NO: 11517 - DNA, 21 bp, Homo sapiens
aaagatttctkctgaactaag

SEQ ID NO: 11518 - DNA, 21 bp, Homo sapiens
cattgagaagytagacaacag

SEQ ID NO: 11519 - DNA, 21 bp, Homo sapiens
atttttatgascttgagataa

SEQ ID NO: 11520 - DNA, 21 bp, Homo sapiens
tagaaacactragtaggccta

SEQ ID NO: 11521 - DNA, 21 bp, Homo sapiens
tacacacaaasattcacagaa

SEQ ID NO: 11522 - DNA, 21 bp, Homo sapiens
ggcatgaagartttggacagc

SEQ ID NO: 11523 - DNA, 21 bp, Homo sapiens
tagaaaattgytcattctcca

SEQ ID NO: 11524 - DNA, 21 bp, Homo sapiens
aggagattagktactggacag

SEQ ID NO: 11525 - DNA, 21 bp, Homo sapiens
tatgaaactgsgtggatgggc

SEQ ID NO: 11526 - DNA, 21 bp, Homo sapiens
ataaggaaatygaaaaataac

SEQ ID NO: 11527 - DNA, 21 bp, Homo sapiens
tttgattggawtgctgtcctt

SEQ ID NO: 11528 - DNA, 21 bp, Homo sapiens
gtgggggatgycaccttacac

SEQ ID NO: 11529 - DNA, 21 bp, Homo sapiens
ataccataccrcgtttcttgg

SEQ ID NO: 11530 - DNA, 21 bp, Homo sapiens
agcatgctccrgtaattggaa

SEQ ID NO: 11531 - DNA, 21 bp, Homo sapiens
ttaggtcacamtttgcatttt

SEQ ID NO: 11532 - DNA, 21 bp, Homo sapiens
acattcttcakacagttatca

SEQ ID NO: 11533 - DNA, 21 bp, Homo sapiens
aacttcacccracttcaggca

SEQ ID NO: 11534 - DNA, 21 bp, Homo sapiens
ctgtttacttyttagtctcta

SEQ ID NO: 11535 - DNA, 21 bp, Homo sapiens
cattcgcctaygtaccaatga

SEQ ID NO: 11536 - DNA, 21 bp, Homo sapiens
tttagcctgayaccaagtcat

SEQ ID NO: 11537 - DNA, 21 bp, Homo sapiens
aagcagaacarctagaactca

SEQ ID NO: 11538 - DNA, 21 bp, Homo sapiens
ttttataacgygattgaaatg

SEQ ID NO: 11539 - DNA, 21 bp, Homo sapiens
caaaattgggytttaggacta

SEQ ID NO: 11540 - DNA, 21 bp, Homo sapiens
tgttaatggasttgaatgagc

SEQ ID NO: 11541 - DNA, 21 bp, Homo sapiens
ctccttccggycggctatcac

SEQ ID NO: 11542 - DNA, 21 bp, Homo sapiens
ccctgctgccrctttctcacc

SEQ ID NO: 11543 - DNA, 21 bp, Homo sapiens
agcatgatttrgaatttatgc

SEQ ID NO: 11544 - DNA, 21 bp, Homo sapiens
caccatcaggsaagcagacta

SEQ ID NO: 11545 - DNA, 21 bp, Homo sapiens
tgggatgctgrtgaagtgtca

SEQ ID NO: 11546 - DNA, 21 bp, Homo sapiens
catgtgcacaratggctttat

SEQ ID NO: 11547 - DNA, 21 bp, Homo sapiens
aggcgctgaaygaatagaacc

SEQ ID NO: 11548 - DNA, 21 bp, Homo sapiens
caattgcaagrtgccctgcta

SEQ ID NO: 11549 - DNA, 21 bp, Homo sapiens
taaaaacgaamggttttggca

SEQ ID NO: 11550 - DNA, 21 bp, Homo sapiens
gttcttttcgrtgacatccca

SEQ ID NO: 11551 - DNA, 21 bp, Homo sapiens
aggaagcaatwtgaaagtgaa

SEQ ID NO: 11552 - DNA, 21 bp, Homo sapiens
ctttacactgstcatttttgg

SEQ ID NO: 11553 - DNA, 21 bp, Homo sapiens
acaggcttagwtttctttcat

SEQ ID NO: 11554 - DNA, 21 bp, Homo sapiens
tcatgggacasagaaacacac

SEQ ID NO: 11555 - DNA, 21 bp, Homo sapiens
gaaatatgacyagcaagcccg

SEQ ID NO: 11556 - DNA, 21 bp, Homo sapiens
agggttccttyagagtgagtg

SEQ ID NO: 11557 - DNA, 21 bp, Homo sapiens
tctaattggtktcacacaagg

SEQ ID NO: 11558 - DNA, 21 bp, Homo sapiens
attctactacwgttcatacat

SEQ ID NO: 11559 - DNA, 21 bp, Homo sapiens
ctaaagcaatwtgatgcccat

SEQ ID NO: 11560 - DNA, 21 bp, Homo sapiens
attttgatgaygtgaatcttg

SEQ ID NO: 11561 - DNA, 21 bp, Homo sapiens
gtattttataraaccctccat

SEQ ID NO: 11562 - DNA, 21 bp, Homo sapiens
ataaaaattcwtgtagttgat

SEQ ID NO: 11563 - DNA, 21 bp, Homo sapiens
acatgaatgastaagcttcct

SEQ ID NO: 11564 - DNA, 21 bp, Homo sapiens
gtacattccaraataaaagat

SEQ ID NO: 11565 - DNA, 21 bp, Homo sapiens
aaacataaagraactaaatca

SEQ ID NO: 11566 - DNA, 21 bp, Homo sapiens
aaagagacggrtcagtttaat

SEQ ID NO: 11567 - DNA, 21 bp, Homo sapiens
gatgtcttagygtattacaat

SEQ ID NO: 11568 - DNA, 21 bp, Homo sapiens
tttagacaagsttaaacccag

SEQ ID NO: 11569 - DNA, 21 bp, Homo sapiens
tgtgaacggarggtagacaga

SEQ ID NO: 11570 - DNA, 21 bp, Homo sapiens
ctcatatggtyttgtggaatt

SEQ ID NO: 11571 - DNA, 21 bp, Homo sapiens
caccagatggractttcccac

SEQ ID NO: 11572 - DNA, 21 bp, Homo sapiens
tgtcaaatggyaacaataact

SEQ ID NO: 11573 - DNA, 21 bp, Homo sapiens
ttgttcaaagragagacacat

SEQ ID NO: 11574 - DNA, 21 bp, Homo sapiens
tgtcttctcaytaatagcaca

SEQ ID NO: 11575 - DNA, 21 bp, Homo sapiens
gttatatcacmgattgagacc

SEQ ID NO: 11576 - DNA, 21 bp, Homo sapiens
aatttagaacwcatttcttgg

SEQ ID NO: 11577 - DNA, 21 bp, Homo sapiens
gtgtggagaakgtgagtaact

SEQ ID NO: 11578 - DNA, 21 bp, Homo sapiens
acatgaatgtyaatttgtatc

SEQ ID NO: 11579 - DNA, 21 bp, Homo sapiens
aatccgatackctgttgatcc

SEQ ID NO: 11580 - DNA, 21 bp, Homo sapiens
caaagcataakgtggagcagt

SEQ ID NO: 11581 - DNA, 21 bp, Homo sapiens
atctccccaaracaagcctta

SEQ ID NO: 11582 - DNA, 21 bp, Homo sapiens
cctcaaaactrtttctcactg

SEQ ID NO: 11583 - DNA, 21 bp, Homo sapiens
cagctgtttcrgtgaatgggc

SEQ ID NO: 11584 - DNA, 21 bp, Homo sapiens
taagaaggacwagggttaata

SEQ ID NO: 11585 - DNA, 21 bp, Homo sapiens
aaagcttcccrtaatacagta

SEQ ID NO: 11586 - DNA, 21 bp, Homo sapiens
ttctaacctgkaaatgaaaaa

SEQ ID NO: 11587 - DNA, 21 bp, Homo sapiens
ttaataagatwatttaaatga

SEQ ID NO: 11588 - DNA, 21 bp, Homo sapiens
ggttggaataraggagaccag

SEQ ID NO: 11589 - DNA, 21 bp, Homo sapiens
tggcatgatgwacaaccctgt

SEQ ID NO: 11590 - DNA, 21 bp, Homo sapiens
ttattcttgtkgacttgtagc

SEQ ID NO: 11591 - DNA, 21 bp, Homo sapiens
aagagaagtaraaggaagcaa

SEQ ID NO: 11592 - DNA, 21 bp, Homo sapiens
attgtaccaaycaggttattt

SEQ ID NO: 11593 - DNA, 21 bp, Homo sapiens
cagaaggcttmaattatatgt

SEQ ID NO: 11594 - DNA, 21 bp, Homo sapiens
gggaaaaaaartcaaactagt

SEQ ID NO: 11595 - DNA, 21 bp, Homo sapiens
gtttggttatyggttcccacc

SEQ ID NO: 11596 - DNA, 21 bp, Homo sapiens
aggcaaccatrgaagagggaa

SEQ ID NO: 11597 - DNA, 21 bp, Homo sapiens
aaacctctccrcagatcaact

SEQ ID NO: 11598 - DNA, 21 bp, Homo sapiens
ttatgtgccayccactaacaa

SEQ ID NO: 11599 - DNA, 21 bp, Homo sapiens
ttacagaaatmctagaaacta

SEQ ID NO: 11600 - DNA, 21 bp, Homo sapiens
gtaatcagttyctacaatcaa

SEQ ID NO: 11601 - DNA, 21 bp, Homo sapiens
gctgaagggcmtatcgaacta

SEQ ID NO: 11602 - DNA, 21 bp, Homo sapiens
agttcaggtaygtcaagacat

SEQ ID NO: 11603 - DNA, 21 bp, Homo sapiens
tcttgtgttcrtctttaaact

SEQ ID NO: 11604 - DNA, 21 bp, Homo sapiens
ttatcttaaarccattttatc

SEQ ID NO: 11605 - DNA, 21 bp, Homo sapiens
ttctggttgasagcttttttt

SEQ ID NO: 11606 - DNA, 21 bp, Homo sapiens
tttaattggasagatgtgata

SEQ ID NO: 11607 - DNA, 21 bp, Homo sapiens
cataatgagcyttaaaacccc

SEQ ID NO: 11608 - DNA, 21 bp, Homo sapiens
taattggtcayggggttaaaa

SEQ ID NO: 11609 - DNA, 21 bp, Homo sapiens
gattgatgttrttagtcgttg

SEQ ID NO: 11610 - DNA, 21 bp, Homo sapiens
attaggaaagyaattaaaatt

SEQ ID NO: 11611 - DNA, 21 bp, Homo sapiens
gtccagaacartgacatctga

SEQ ID NO: 11612 - DNA, 21 bp, Homo sapiens
gtcggtacccrtttgttgagt

SEQ ID NO: 11613 - DNA, 21 bp, Homo sapiens
cgatgaaaatrataatcacaa

SEQ ID NO: 11614 - DNA, 21 bp, Homo sapiens
ctgatcaggcraagtgagaga

SEQ ID NO: 11615 - DNA, 21 bp, Homo sapiens
cctttggaaayagcaaaatga

SEQ ID NO: 11616 - DNA, 21 bp, Homo sapiens
aacaggaagckggtcattatt

SEQ ID NO: 11617 - DNA, 21 bp, Homo sapiens
ctctctggatrgactaaatag

SEQ ID NO: 11618 - DNA, 21 bp, Homo sapiens
ttagttcctcrcttatagctc

SEQ ID NO: 11619 - DNA, 21 bp, Homo sapiens
attctagcccrtgctgtgaca

SEQ ID NO: 11620 - DNA, 21 bp, Homo sapiens
tgttagtatgmacaataggta

SEQ ID NO: 11621 - DNA, 21 bp, Homo sapiens
taagatcagcygttgttcatt

SEQ ID NO: 11622 - DNA, 21 bp, Homo sapiens
ttggaatattragggactgaa

SEQ ID NO: 11623 - DNA, 21 bp, Homo sapiens
cattaaaattmtgtagtgata

SEQ ID NO: 11624 - DNA, 21 bp, Homo sapiens
ttctattttaycaggaaggtg

SEQ ID NO: 11625 - DNA, 21 bp, Homo sapiens
gaaaagggtgktctatgccac

SEQ ID NO: 11626 - DNA, 21 bp, Homo sapiens
tcatatttgcmccagtgaaga

SEQ ID NO: 11627 - DNA, 21 bp, Homo sapiens
gaaaattctgraagaacacgt

SEQ ID NO: 11628 - DNA, 21 bp, Homo sapiens
atggggttttkgcactcagaa

SEQ ID NO: 11629 - DNA, 21 bp, Homo sapiens
catttcaataycttaggcatt

SEQ ID NO: 11630 - DNA, 21 bp, Homo sapiens
tgaatgtcttrgtcacactga

SEQ ID NO: 11631 - DNA, 21 bp, Homo sapiens
ttcatctcttmgtttttgcac

SEQ ID NO: 11632 - DNA, 21 bp, Homo sapiens
cacgtttttayttgcacttaa

SEQ ID NO: 11633 - DNA, 21 bp, Homo sapiens
aaatgagagawgtaacctcag

SEQ ID NO: 11634 - DNA, 21 bp, Homo sapiens
tctttgccctsaacattaaga

SEQ ID NO: 11635 - DNA, 21 bp, Homo sapiens
gagaaaagcartttctacatc

SEQ ID NO: 11636 - DNA, 21 bp, Homo sapiens
attgctgggaytacaatcaac

SEQ ID NO: 11637 - DNA, 21 bp, Homo sapiens
ttcaaatttcrctacctagag

SEQ ID NO: 11638 - DNA, 21 bp, Homo sapiens
aacacatcgcyattaaatccc

SEQ ID NO: 11639 - DNA, 21 bp, Homo sapiens
gcaagtgtatyaatttcttat

SEQ ID NO: 11640 - DNA, 21 bp, Homo sapiens
ctttctcaggytttgctttca

SEQ ID NO: 11641 - DNA, 21 bp, Homo sapiens
tagtttaaaaygacaacatta

SEQ ID NO: 11642 - DNA, 21 bp, Homo sapiens
gctatcataakaagttcaaat

SEQ ID NO: 11643 - DNA, 21 bp, Homo sapiens
cattgtatgtycatgtcatca

SEQ ID NO: 11644 - DNA, 21 bp, Homo sapiens
tttcccacgcrggtttgtctc

SEQ ID NO: 11645 - DNA, 21 bp, Homo sapiens
atcatgtttarcaatcatgca

SEQ ID NO: 11646 - DNA, 21 bp, Homo sapiens
gaagatgataragcacagact

SEQ ID NO: 11647 - DNA, 21 bp, Homo sapiens
tcatttcttarcagatcatat

SEQ ID NO: 11648 - DNA, 21 bp, Homo sapiens
cttcccaagarctcccatgac

SEQ ID NO: 11649 - DNA, 21 bp, Homo sapiens
caagctcatgraaaatggaag

SEQ ID NO: 11650 - DNA, 21 bp, Homo sapiens
caggctatgcrtggattataa

SEQ ID NO: 11651 - DNA, 21 bp, Homo sapiens
tgtcaacagtsaattgcactt

SEQ ID NO: 11652 - DNA, 21 bp, Homo sapiens
gattcttcttygtaatgcttg

SEQ ID NO: 11653 - DNA, 21 bp, Homo sapiens
tagtgtgcatmaaagtgacca

SEQ ID NO: 11654 - DNA, 21 bp, Homo sapiens
aacaaacaacyttttagactc

SEQ ID NO: 11655 - DNA, 21 bp, Homo sapiens
tcaatagatgsgtatgctttg

SEQ ID NO: 11656 - DNA, 21 bp, Homo sapiens
ttatgtacttktcaacagaaa

SEQ ID NO: 11657 - DNA, 21 bp, Homo sapiens
tgggaaacagycaaggatcat

SEQ ID NO: 11658 - DNA, 21 bp, Homo sapiens
attgcccccaytgtgctgaaa

SEQ ID NO: 11659 - DNA, 21 bp, Homo sapiens
ttctgttgtcmttttatctct

SEQ ID NO: 11660 - DNA, 21 bp, Homo sapiens
ctgccctcatytggatgcttt

SEQ ID NO: 11661 - DNA, 21 bp, Homo sapiens
tttcaactaaratacaatgat

SEQ ID NO: 11662 - DNA, 21 bp, Homo sapiens
gtagaaactgrtaccatgcta

SEQ ID NO: 11663 - DNA, 21 bp, Homo sapiens
tggtcattggmagaaataaaa

SEQ ID NO: 11664 - DNA, 21 bp, Homo sapiens
ccccaaatacsttctcagtcc

SEQ ID NO: 11665 - DNA, 21 bp, Homo sapiens
tattagcagtrcctagagaaa

SEQ ID NO: 11666 - DNA, 21 bp, Homo sapiens
ctaaaaactcwctgtattagg

SEQ ID NO: 11667 - DNA, 21 bp, Homo sapiens
aaactttaacrctaacctata

SEQ ID NO: 11668 - DNA, 21 bp, Homo sapiens
tccaactttcrtaaatgctct

SEQ ID NO: 11669 - DNA, 21 bp, Homo sapiens
aatgaaggaasatagggagca

SEQ ID NO: 11670 - DNA, 21 bp, Homo sapiens
acaaattaaawccaggtgaaa

SEQ ID NO: 11671 - DNA, 21 bp, Homo sapiens
aaagagaaatraatgggtaat

SEQ ID NO: 11672 - DNA, 21 bp, Homo sapiens
gtaccatttartggactccag

SEQ ID NO: 11673 - DNA, 21 bp, Homo sapiens
caagtggttayggggagaaga

SEQ ID NO: 11674 - DNA, 21 bp, Homo sapiens
tagattgagtygtggctaaac

SEQ ID NO: 11675 - DNA, 21 bp, Homo sapiens
tccaaatgtargtacagacct

SEQ ID NO: 11676 - DNA, 21 bp, Homo sapiens
aatttggcaawgaataaaatt

SEQ ID NO: 11677 - DNA, 21 bp, Homo sapiens
acaacttccarggagatttct

SEQ ID NO: 11678 - DNA, 21 bp, Homo sapiens
agagcattctscaacataaca

SEQ ID NO: 11679 - DNA, 21 bp, Homo sapiens
tttagactggkctatttaaga

SEQ ID NO: 11680 - DNA, 21 bp, Homo sapiens
agtcataatarccaaccactt

SEQ ID NO: 11681 - DNA, 21 bp, Homo sapiens
gtaagtgattstagacaagaa

SEQ ID NO: 11682 - DNA, 21 bp, Homo sapiens
aaaaaagcatwagtttcatag

SEQ ID NO: 11683 - DNA, 21 bp, Homo sapiens
aacagaagagytaatatatag

SEQ ID NO: 11684 - DNA, 21 bp, Homo sapiens
caattcgaatktttttttgtg

SEQ ID NO: 11685 - DNA, 21 bp, Homo sapiens
ggtcatgttamatctttgctc

SEQ ID NO: 11686 - DNA, 21 bp, Homo sapiens
atgttgggtakgtcaaggcct

SEQ ID NO: 11687 - DNA, 21 bp, Homo sapiens
gatgaacactsagataggaca

SEQ ID NO: 11688 - DNA, 21 bp, Homo sapiens
actgggaaatmattcagagct

SEQ ID NO: 11689 - DNA, 21 bp, Homo sapiens
ttattggattrtactgagaat

SEQ ID NO: 11690 - DNA, 21 bp, Homo sapiens
atcagagctcrttctaaaata

SEQ ID NO: 11691 - DNA, 21 bp, Homo sapiens
aatcagtatcwcacaataagt

SEQ ID NO: 11692 - DNA, 21 bp, Homo sapiens
ggagaactagmatttatgcat

SEQ ID NO: 11693 - DNA, 21 bp, Homo sapiens
catggtcggcracaggccatg

SEQ ID NO: 11694 - DNA, 21 bp, Homo sapiens
acaggccttcygtcctagcag

SEQ ID NO: 11695 - DNA, 21 bp, Homo sapiens
ttaccaatgcragatcacccc

SEQ ID NO: 11696 - DNA, 21 bp, Homo sapiens
ttttgggacargttgcatttc

SEQ ID NO: 11697 - DNA, 21 bp, Homo sapiens
ggaaattgccrgtaattgtct

SEQ ID NO: 11698 - DNA, 21 bp, Homo sapiens
tccccagggcycgggattgtg

SEQ ID NO: 11699 - DNA, 21 bp, Homo sapiens
gatttaggccrtcaaaaaaag

SEQ ID NO: 11700 - DNA, 21 bp, Homo sapiens
ccacaaggcarataaggactc

SEQ ID NO: 11701 - DNA, 21 bp, Homo sapiens
tttagtgcagycacattttcc

SEQ ID NO: 11702 - DNA, 21 bp, Homo sapiens
aaattatttgraagtgttccc

SEQ ID NO: 11703 - DNA, 21 bp, Homo sapiens
agcaatacctkgtacagatta

SEQ ID NO: 11704 - DNA, 21 bp, Homo sapiens
ctaagtcattstgaattcaac

SEQ ID NO: 11705 - DNA, 21 bp, Homo sapiens
cataagcacckgaacactaaa

SEQ ID NO: 11706 - DNA, 21 bp, Homo sapiens
gatcatcatcrgtacactttg

SEQ ID NO: 11707 - DNA, 21 bp, Homo sapiens
ttctttaaagkccggtcacca

SEQ ID NO: 11708 - DNA, 21 bp, Homo sapiens
cctcacgaacractcaaaggt

SEQ ID NO: 11709 - DNA, 21 bp, Homo sapiens
ctactaactawgcccatctct

SEQ ID NO: 11710 - DNA, 21 bp, Homo sapiens
gaagttgatayctgatgacat

SEQ ID NO: 11711 - DNA, 21 bp, Homo sapiens
aatcactattrcatcatcagc

SEQ ID NO: 11712 - DNA, 21 bp, Homo sapiens
ctctggaggakactatgataa

SEQ ID NO: 11713 - DNA, 21 bp, Homo sapiens
atctttgacaytggagtaagg

SEQ ID NO: 11714 - DNA, 21 bp, Homo sapiens
tctgggaaacsttctgtgtta

SEQ ID NO: 11715 - DNA, 21 bp, Homo sapiens
aaattatggcwtggaagtcta

SEQ ID NO: 11716 - DNA, 21 bp, Homo sapiens
aatatagttayatgttttcaa

SEQ ID NO: 11717 - DNA, 21 bp, Homo sapiens
ataacacagtrtcaatttttc

SEQ ID NO: 11718 - DNA, 21 bp, Homo sapiens
gtaatgttgtytctatacctg

SEQ ID NO: 11719 - DNA, 21 bp, Homo sapiens
atcctgggctyccacatggca

SEQ ID NO: 11720 - DNA, 21 bp, Homo sapiens
tagccttgaaygtccatctaa

SEQ ID NO: 11721 - DNA, 21 bp, Homo sapiens
ttgatctgctygcaaagatag

SEQ ID NO: 11722 - DNA, 21 bp, Homo sapiens
aatgtgcaagycttaaaaata

SEQ ID NO: 11723 - DNA, 21 bp, Homo sapiens
tgaatctccckgcagcatcta

SEQ ID NO: 11724 - DNA, 21 bp, Homo sapiens
aataacagtgyaagtgtctgg

SEQ ID NO: 11725 - DNA, 21 bp, Homo sapiens
cgcatcctgawatgaacaccc

SEQ ID NO: 11726 - DNA, 21 bp, Homo sapiens
accaaaggtartaaatccata

SEQ ID NO: 11727 - DNA, 21 bp, Homo sapiens
agcatagctcrgcactgtttg

SEQ ID NO: 11728 - DNA, 21 bp, Homo sapiens
atgccaatggratgaattctg

SEQ ID NO: 11729 - DNA, 21 bp, Homo sapiens
cacagtcccarcaaagacaac

SEQ ID NO: 11730 - DNA, 21 bp, Homo sapiens
tcagatgggcrtagcgggact

SEQ ID NO: 11731 - DNA, 21 bp, Homo sapiens
gcctgccagaraggggctttc

SEQ ID NO: 11732 - DNA, 21 bp, Homo sapiens
tacctggtcarcagcctggct

SEQ ID NO: 11733 - DNA, 21 bp, Homo sapiens
ccattagttgraaaactgtac

SEQ ID NO: 11734 - DNA, 21 bp, Homo sapiens
attctgtggayaaggtgaaaa

SEQ ID NO: 11735 - DNA, 21 bp, Homo sapiens
tcttgaaagaygtttgcctgc

SEQ ID NO: 11736 - DNA, 21 bp, Homo sapiens
tacctttccakatctttcttc

SEQ ID NO: 11737 - DNA, 21 bp, Homo sapiens
cccaactcatygctctctggc

SEQ ID NO: 11738 - DNA, 21 bp, Homo sapiens
acatttctaayaaaggcttct

SEQ ID NO: 11739 - DNA, 21 bp, Homo sapiens
gaattcagtgratcatctatc

SEQ ID NO: 11740 - DNA, 21 bp, Homo sapiens
agagagaaaayggccttttga

SEQ ID NO: 11741 - DNA, 21 bp, Homo sapiens
ccctagccacrgataaaatag

SEQ ID NO: 11742 - DNA, 21 bp, Homo sapiens
gtttacctgcmgacaaataaa

SEQ ID NO: 11743 - DNA, 21 bp, Homo sapiens
gacttttcagwggaatgcaat

SEQ ID NO: 11744 - DNA, 21 bp, Homo sapiens
tatactgagasgcctaggaat

SEQ ID NO: 11745 - DNA, 21 bp, Homo sapiens
ctaagaacatrgcattttata

SEQ ID NO: 11746 - DNA, 21 bp, Homo sapiens
aaaaaaatacrgagttagtga

SEQ ID NO: 11747 - DNA, 21 bp, Homo sapiens
tcacaaagcayggtgatgaca

SEQ ID NO: 11748 - DNA, 21 bp, Homo sapiens
agaaactggcrtgtgataatg

SEQ ID NO: 11749 - DNA, 21 bp, Homo sapiens
tttgacttttyaacccttcca

SEQ ID NO: 11750 - DNA, 21 bp, Homo sapiens
agagcatcagsgggacctcat

SEQ ID NO: 11751 - DNA, 21 bp, Homo sapiens
ttaaaaaatarcaggaattac

SEQ ID NO: 11752 - DNA, 21 bp, Homo sapiens
gatttcaaacktcttcagtta

SEQ ID NO: 11753 - DNA, 21 bp, Homo sapiens
ccagaaaagckgtatcttcct

SEQ ID NO: 11754 - DNA, 21 bp, Homo sapiens
gtatcatccayactgtgtatc

SEQ ID NO: 11755 - DNA, 21 bp, Homo sapiens
taaaatagcgkggttaggtgt

SEQ ID NO: 11756 - DNA, 21 bp, Homo sapiens
ctgtgcagtarggcaacagtc

SEQ ID NO: 11757 - DNA, 21 bp, Homo sapiens
tcaacttgagrcaaagcagga

SEQ ID NO: 11758 - DNA, 21 bp, Homo sapiens
aatggtatttkctttttaaga

SEQ ID NO: 11759 - DNA, 21 bp, Homo sapiens
tatcagtttamtttggtttta

SEQ ID NO: 11760 - DNA, 21 bp, Homo sapiens
tgcgctttatygtttgtattt

SEQ ID NO: 11761 - DNA, 21 bp, Homo sapiens
gaagaagaacragtggatata

SEQ ID NO: 11762 - DNA, 21 bp, Homo sapiens
accaccctcayggtgacaggg

SEQ ID NO: 11763 - DNA, 21 bp, Homo sapiens
tcctgtgcctygttacggtgc

SEQ ID NO: 11764 - DNA, 21 bp, Homo sapiens
tggtgtgctawctttttaatt

SEQ ID NO: 11765 - DNA, 21 bp, Homo sapiens
ccttcgtttgyagagcaatgt

SEQ ID NO: 11766 - DNA, 21 bp, Homo sapiens
aaagctgaatkaaaaaatcaa

SEQ ID NO: 11767 - DNA, 21 bp, Homo sapiens
taaacctgaaytctaagagca

SEQ ID NO: 11768 - DNA, 21 bp, Homo sapiens
aggagttttcwcagataaaaa

SEQ ID NO: 11769 - DNA, 21 bp, Homo sapiens
aaaagcatacrttagtcacaa

SEQ ID NO: 11770 - DNA, 21 bp, Homo sapiens
tgatgtttackgagggctatt

SEQ ID NO: 11771 - DNA, 21 bp, Homo sapiens
tgtaagctgcmtcctggaatt

SEQ ID NO: 11772 - DNA, 21 bp, Homo sapiens
tacgtgtctgyctgggatgct

SEQ ID NO: 11773 - DNA, 21 bp, Homo sapiens
cctaacgttcwatttgagatt

SEQ ID NO: 11774 - DNA, 21 bp, Homo sapiens
ttaagtcacasggtgctcatt

SEQ ID NO: 11775 - DNA, 21 bp, Homo sapiens
aagaaagtacrttgatggtgt

SEQ ID NO: 11776 - DNA, 21 bp, Homo sapiens
tatttatttgycccatctaca

SEQ ID NO: 11777 - DNA, 21 bp, Homo sapiens
aggtgccaagkcctgtcatat

SEQ ID NO: 11778 - DNA, 21 bp, Homo sapiens
aaaaaaatctrggatctaact

SEQ ID NO: 11779 - DNA, 21 bp, Homo sapiens
aatagctaggrcatttaaaac

SEQ ID NO: 11780 - DNA, 21 bp, Homo sapiens
tgtaaacattragaaatatac

SEQ ID NO: 11781 - DNA, 21 bp, Homo sapiens
aaactcttagsatatctatct

SEQ ID NO: 11782 - DNA, 21 bp, Homo sapiens
ctttgcataarccaattataa

SEQ ID NO: 11783 - DNA, 21 bp, Homo sapiens
cttgtccctcrtaagggcgct

SEQ ID NO: 11784 - DNA, 21 bp, Homo sapiens
tcttaagtgcrtttgtttata

SEQ ID NO: 11785 - DNA, 21 bp, Homo sapiens
tctagcaggakatgccgtgcc

SEQ ID NO: 11786 - DNA, 21 bp, Homo sapiens
ttgctaggccmatgctgctgt

SEQ ID NO: 11787 - DNA, 21 bp, Homo sapiens
ttcccttcgcstctaacacac

SEQ ID NO: 11788 - DNA, 21 bp, Homo sapiens
ctaatatcttracttgatgtt

SEQ ID NO: 11789 - DNA, 21 bp, Homo sapiens
aactcctaccmagttcagcct

SEQ ID NO: 11790 - DNA, 21 bp, Homo sapiens
tacaaggcggwttgttgactt

SEQ ID NO: 11791 - DNA, 21 bp, Homo sapiens
gtagaagaatytgtgagggca

SEQ ID NO: 11792 - DNA, 21 bp, Homo sapiens
gagacaggacrtacaaaggcc

SEQ ID NO: 11793 - DNA, 21 bp, Homo sapiens
agaaaaacagrttaaaaacaa

SEQ ID NO: 11794 - DNA, 21 bp, Homo sapiens
gattgccctcygttagtctca

SEQ ID NO: 11795 - DNA, 21 bp, Homo sapiens
ctaggttccaygttacccttt

SEQ ID NO: 11796 - DNA, 21 bp, Homo sapiens
ccatgatcccrtaattgttgg

SEQ ID NO: 11797 - DNA, 21 bp, Homo sapiens
gagtcagcaaygatatgcttg

SEQ ID NO: 11798 - DNA, 21 bp, Homo sapiens
tgtttccatargatctgcttc

SEQ ID NO: 11799 - DNA, 21 bp, Homo sapiens
ttaagaaagtrgtgaagggca

SEQ ID NO: 11800 - DNA, 21 bp, Homo sapiens
actactctttmatctactttt

SEQ ID NO: 11801 - DNA, 21 bp, Homo sapiens
ccatttgatgrgatagtttgc

SEQ ID NO: 11802 - DNA, 21 bp, Homo sapiens
tctccaaacartcaattttta

SEQ ID NO: 11803 - DNA, 21 bp, Homo sapiens
ccactgttatrccatctctct

SEQ ID NO: 11804 - DNA, 21 bp, Homo sapiens
tttcaaaaagratgtagctgg

SEQ ID NO: 11805 - DNA, 21 bp, Homo sapiens
actacttctaygggaaaagag

SEQ ID NO: 11806 - DNA, 21 bp, Homo sapiens
ctgtggtagawccaaaaatgg

SEQ ID NO: 11807 - DNA, 21 bp, Homo sapiens
acatgtgagcyggcgaagatg

SEQ ID NO: 11808 - DNA, 21 bp, Homo sapiens
ataaaagttaytacatctgaa

SEQ ID NO: 11809 - DNA, 21 bp, Homo sapiens
cagaattgaasagttacaaat

SEQ ID NO: 11810 - DNA, 21 bp, Homo sapiens
ctgtatattgragatgtagac

SEQ ID NO: 11811 - DNA, 21 bp, Homo sapiens
cctctaatatmtggatttcct

SEQ ID NO: 11812 - DNA, 21 bp, Homo sapiens
tagttttgttyatacacaggt

SEQ ID NO: 11813 - DNA, 21 bp, Homo sapiens
tgcttaactarctaaattgct

SEQ ID NO: 11814 - DNA, 21 bp, Homo sapiens
cgaatccagartctcaggtaa

SEQ ID NO: 11815 - DNA, 21 bp, Homo sapiens
aataggttcaytcaggataaa

SEQ ID NO: 11816 - DNA, 21 bp, Homo sapiens
agtgtgaaacygtttgggatc

SEQ ID NO: 11817 - DNA, 21 bp, Homo sapiens
atgtctgatasagttcactag

SEQ ID NO: 11818 - DNA, 21 bp, Homo sapiens
ttgcaggaatygcctgtgcct

SEQ ID NO: 11819 - DNA, 21 bp, Homo sapiens
gtagtgtcctscacatcggtc

SEQ ID NO: 11820 - DNA, 21 bp, Homo sapiens
tggaattcaaragacatcaca

SEQ ID NO: 11821 - DNA, 21 bp, Homo sapiens
gctattctacrcagcaaatca

SEQ ID NO: 11822 - DNA, 21 bp, Homo sapiens
tactgtatgaytcaaaggcta

SEQ ID NO: 11823 - DNA, 21 bp, Homo sapiens
ggaggactggmtaatttcagg

SEQ ID NO: 11824 - DNA, 21 bp, Homo sapiens
attcttgagtrataagtggaa

SEQ ID NO: 11825 - DNA, 21 bp, Homo sapiens
ctaccgttacktgaggccttc

SEQ ID NO: 11826 - DNA, 21 bp, Homo sapiens
atctaaaatcsggtgctggat

SEQ ID NO: 11827 - DNA, 21 bp, Homo sapiens
aatccagagtrgaaatacaag

SEQ ID NO: 11828 - DNA, 21 bp, Homo sapiens
acattacttgrtgtgctaagt

SEQ ID NO: 11829 - DNA, 21 bp, Homo sapiens
gtgttggccasgccaagcttg

SEQ ID NO: 11830 - DNA, 21 bp, Homo sapiens
attaaccgagyattttcaaaa

SEQ ID NO: 11831 - DNA, 21 bp, Homo sapiens
catgatggatraataagaaac

SEQ ID NO: 11832 - DNA, 21 bp, Homo sapiens
agccaagatgktatacagttg

SEQ ID NO: 11833 - DNA, 21 bp, Homo sapiens
agtcctctgarcctcccttct

SEQ ID NO: 11834 - DNA, 21 bp, Homo sapiens
tctagccacaygatgctccct

SEQ ID NO: 11835 - DNA, 21 bp, Homo sapiens
tttcttcagcrtgctaacttc

SEQ ID NO: 11836 - DNA, 21 bp, Homo sapiens
ctaggtctgaygggatctcta

SEQ ID NO: 11837 - DNA, 21 bp, Homo sapiens
aagtaagctcrtgaagctatt

SEQ ID NO: 11838 - DNA, 21 bp, Homo sapiens
taactgtaatrtaactgcaat

SEQ ID NO: 11839 - DNA, 21 bp, Homo sapiens
tcggacaaaarcagaaatgta

SEQ ID NO: 11840 - DNA, 21 bp, Homo sapiens
tgcgcacagcyctagggatca

SEQ ID NO: 11841 - DNA, 21 bp, Homo sapiens
tataaaattcrtgaaattaat

SEQ ID NO: 11842 - DNA, 21 bp, Homo sapiens
aaaacaagttwtctgtatctg

SEQ ID NO: 11843 - DNA, 21 bp, Homo sapiens
aattagttagyactccactgc

SEQ ID NO: 11844 - DNA, 21 bp, Homo sapiens
attttggtacmtttcaaatac

SEQ ID NO: 11845 - DNA, 21 bp, Homo sapiens
cttgtcccctrtttctgcagc

SEQ ID NO: 11846 - DNA, 21 bp, Homo sapiens
tttcttcagarccatatccat

SEQ ID NO: 11847 - DNA, 21 bp, Homo sapiens
ctgtatcagartaataaagtg

SEQ ID NO: 11848 - DNA, 21 bp, Homo sapiens
acttgatagtyttatatagcc

SEQ ID NO: 11849 - DNA, 21 bp, Homo sapiens
accaatagcasatgacttcag

SEQ ID NO: 11850 - DNA, 21 bp, Homo sapiens
tccttactgtrtgacctgctg

SEQ ID NO: 11851 - DNA, 21 bp, Homo sapiens
cataacagatsaaccaggttc

SEQ ID NO: 11852 - DNA, 21 bp, Homo sapiens
aaatatccaarcactattcaa

SEQ ID NO: 11853 - DNA, 21 bp, Homo sapiens
atgtaagaccratcataaaaa

SEQ ID NO: 11854 - DNA, 21 bp, Homo sapiens
ttaaacaggtkgccttaaggt

SEQ ID NO: 11855 - DNA, 21 bp, Homo sapiens
ggacatcacgrcagaaattac

SEQ ID NO: 11856 - DNA, 21 bp, Homo sapiens
caagtgatgcmatctattgag

SEQ ID NO: 11857 - DNA, 21 bp, Homo sapiens
cacatgtgacwttcgggctta

SEQ ID NO: 11858 - DNA, 21 bp, Homo sapiens
ccatgactgaygtggtgagat

SEQ ID NO: 11859 - DNA, 21 bp, Homo sapiens
gaaatttactmcgggaaggca

SEQ ID NO: 11860 - DNA, 21 bp, Homo sapiens
acacaaaaacrgagtcaagaa

SEQ ID NO: 11861 - DNA, 21 bp, Homo sapiens
acatcattgcrggtactattg

SEQ ID NO: 11862 - DNA, 21 bp, Homo sapiens
tcgaacaaaarttacctatta

SEQ ID NO: 11863 - DNA, 21 bp, Homo sapiens
tgacatgtaarcaactttcag

SEQ ID NO: 11864 - DNA, 21 bp, Homo sapiens
aacaagactargaagctttta

SEQ ID NO: 11865 - DNA, 21 bp, Homo sapiens
tttgaaacgasattgatttaa

SEQ ID NO: 11866 - DNA, 21 bp, Homo sapiens
gggaccttttmcataaagaga

SEQ ID NO: 11867 - DNA, 21 bp, Homo sapiens
tatctacaggrccgtaactac

SEQ ID NO: 11868 - DNA, 21 bp, Homo sapiens
cagcagtctaygttttgtgca

SEQ ID NO: 11869 - DNA, 21 bp, Homo sapiens
tgcctgtgtgyagcaacagtt

SEQ ID NO: 11870 - DNA, 21 bp, Homo sapiens
gcttatggtgwtgaattcaaa

SEQ ID NO: 11871 - DNA, 21 bp, Homo sapiens
gcatctcctgmaagttaacta

SEQ ID NO: 11872 - DNA, 21 bp, Homo sapiens
ggtggaagaamctatggctgg

SEQ ID NO: 11873 - DNA, 21 bp, Homo sapiens
aaacaaataawctactttatg

SEQ ID NO: 11874 - DNA, 21 bp, Homo sapiens
ataaaactaayctccaataaa

SEQ ID NO: 11875 - DNA, 21 bp, Homo sapiens
atgtgtatgcrtatgtatggg

SEQ ID NO: 11876 - DNA, 21 bp, Homo sapiens
gacatggaatrtctgtttcaa

SEQ ID NO: 11877 - DNA, 21 bp, Homo sapiens
ttgcaactttsacatccagga

SEQ ID NO: 11878 - DNA, 21 bp, Homo sapiens
ttcaaatgcgragaatcgttt

SEQ ID NO: 11879 - DNA, 21 bp, Homo sapiens
attttttcttsaatgaatttt

SEQ ID NO: 11880 - DNA, 21 bp, Homo sapiens
tcctttctgcrtgtgatttcg

SEQ ID NO: 11881 - DNA, 21 bp, Homo sapiens
gatacctccamagtatgtgtt

SEQ ID NO: 11882 - DNA, 21 bp, Homo sapiens
ataatgtgcaygtgtatctca

SEQ ID NO: 11883 - DNA, 21 bp, Homo sapiens
tgttttaagtktgtatgtttt

SEQ ID NO: 11884 - DNA, 21 bp, Homo sapiens
tattcaccacrtactctaata

SEQ ID NO: 11885 - DNA, 21 bp, Homo sapiens
ctaaacttatstgcttttctc

SEQ ID NO: 11886 - DNA, 21 bp, Homo sapiens
gtttccatatygtgttagacc

SEQ ID NO: 11887 - DNA, 21 bp, Homo sapiens
cagccttgttsaagtctctat

SEQ ID NO: 11888 - DNA, 21 bp, Homo sapiens
catattcctargtggcttcca

SEQ ID NO: 11889 - DNA, 21 bp, Homo sapiens
aaacacctgawgcaacatagt

SEQ ID NO: 11890 - DNA, 21 bp, Homo sapiens
ctcctcaatayaaaatagtct

SEQ ID NO: 11891 - DNA, 21 bp, Homo sapiens
tcagtgatgayttgagactgt

SEQ ID NO: 11892 - DNA, 21 bp, Homo sapiens
atctcaaggawattaagctgt

SEQ ID NO: 11893 - DNA, 21 bp, Homo sapiens
ttcctcttctycaggcttgct

SEQ ID NO: 11894 - DNA, 21 bp, Homo sapiens
cagatagcatwttgtttaaca

SEQ ID NO: 11895 - DNA, 21 bp, Homo sapiens
tattctttcgyttaggagata

SEQ ID NO: 11896 - DNA, 21 bp, Homo sapiens
tggggcaccayttagcagtcc

SEQ ID NO: 11897 - DNA, 21 bp, Homo sapiens
attgagctgcracatgggaaa

SEQ ID NO: 11898 - DNA, 21 bp, Homo sapiens
agtggtggatrtatagttggt

SEQ ID NO: 11899 - DNA, 21 bp, Homo sapiens
agagagttctyaggaaagttg

SEQ ID NO: 11900 - DNA, 21 bp, Homo sapiens
cgaatttcacwtgagcagagc

SEQ ID NO: 11901 - DNA, 21 bp, Homo sapiens
tattcttaccrttttaggttt

SEQ ID NO: 11902 - DNA, 21 bp, Homo sapiens
agtggtgggcrtatttaagat

SEQ ID NO: 11903 - DNA, 21 bp, Homo sapiens
ctgaagttcartcataatcac

SEQ ID NO: 11904 - DNA, 21 bp, Homo sapiens
aaaccttcagrgaaaaccatt

SEQ ID NO: 11905 - DNA, 21 bp, Homo sapiens
acgtgggagcrctagtggaca

SEQ ID NO: 11906 - DNA, 21 bp, Homo sapiens
tgccaagactrtgaggcacca

SEQ ID NO: 11907 - DNA, 21 bp, Homo sapiens
agtatctgttyctccattcac

SEQ ID NO: 11908 - DNA, 21 bp, Homo sapiens
tgtttttctcrgtgtccctca

SEQ ID NO: 11909 - DNA, 21 bp, Homo sapiens
cgtgaagcagratttccccag

SEQ ID NO: 11910 - DNA, 21 bp, Homo sapiens
ggccagccaayttaggtttct

SEQ ID NO: 11911 - DNA, 21 bp, Homo sapiens
tgctgcatcaraaaggattat

SEQ ID NO: 11912 - DNA, 21 bp, Homo sapiens
caaggacaacrtgctttaaat

SEQ ID NO: 11913 - DNA, 21 bp, Homo sapiens
acctaggcacwttggatcata

SEQ ID NO: 11914 - DNA, 21 bp, Homo sapiens
ttatccttgawcattttacca

SEQ ID NO: 11915 - DNA, 21 bp, Homo sapiens
ggggtgatgcytattttgttc

SEQ ID NO: 11916 - DNA, 21 bp, Homo sapiens
taatattttgktcatctacaa

SEQ ID NO: 11917 - DNA, 21 bp, Homo sapiens
ctttgtgccaytctgtcatca

SEQ ID NO: 11918 - DNA, 21 bp, Homo sapiens
atcatctcagygcaaagaagc

SEQ ID NO: 11919 - DNA, 21 bp, Homo sapiens
catctctcagktgtcctagat

SEQ ID NO: 11920 - DNA, 21 bp, Homo sapiens
acatgaaggayaagaaggcag

SEQ ID NO: 11921 - DNA, 21 bp, Homo sapiens
acaatttcctrttgaatccct

SEQ ID NO: 11922 - DNA, 21 bp, Homo sapiens
gcttcatagaytgtgcaacaa

SEQ ID NO: 11923 - DNA, 21 bp, Homo sapiens
tatttgctatkaaatccatgg

SEQ ID NO: 11924 - DNA, 21 bp, Homo sapiens
tcattaatacsacaactttag

SEQ ID NO: 11925 - DNA, 21 bp, Homo sapiens
acgtaatttcyagcttaacag

SEQ ID NO: 11926 - DNA, 21 bp, Homo sapiens
ctatacgaacrtcacttctga

SEQ ID NO: 11927 - DNA, 21 bp, Homo sapiens
gaaataatctstacgaagaaa

SEQ ID NO: 11928 - DNA, 21 bp, Homo sapiens
gaagtggggcygtaaaggtgc

SEQ ID NO: 11929 - DNA, 21 bp, Homo sapiens
gtgacctcctractatcctct

SEQ ID NO: 11930 - DNA, 21 bp, Homo sapiens
ggatctgcttraagatcttta

SEQ ID NO: 11931 - DNA, 21 bp, Homo sapiens
tacaactaaayagatcttcaa

SEQ ID NO: 11932 - DNA, 21 bp, Homo sapiens
ttattagctakgtaaaagctc

SEQ ID NO: 11933 - DNA, 21 bp, Homo sapiens
aagcaggatgytgctgctaca

SEQ ID NO: 11934 - DNA, 21 bp, Homo sapiens
tttagtcacaytgaatttttg

SEQ ID NO: 11935 - DNA, 21 bp, Homo sapiens
ctagtacagayggacacagtt

SEQ ID NO: 11936 - DNA, 21 bp, Homo sapiens
ttttgatggcygcctttcaat

SEQ ID NO: 11937 - DNA, 21 bp, Homo sapiens
catggcagccygaacactgtc

SEQ ID NO: 11938 - DNA, 21 bp, Homo sapiens
aagcctaaaayactctgagta

SEQ ID NO: 11939 - DNA, 21 bp, Homo sapiens
catatgctcartaaccacatg

SEQ ID NO: 11940 - DNA, 21 bp, Homo sapiens
ctaaatagtcrttttttacct

SEQ ID NO: 11941 - DNA, 21 bp, Homo sapiens
gaggctcctayggagtctgga

SEQ ID NO: 11942 - DNA, 21 bp, Homo sapiens
aaatatttgcyatccatacat

SEQ ID NO: 11943 - DNA, 21 bp, Homo sapiens
cttacgcatckggataattcc

SEQ ID NO: 11944 - DNA, 21 bp, Homo sapiens
cctatagatgytattaagttg

SEQ ID NO: 11945 - DNA, 21 bp, Homo sapiens
tctaaagagtrtagtcacaga

SEQ ID NO: 11946 - DNA, 21 bp, Homo sapiens
caagaacctgygtaggctact

SEQ ID NO: 11947 - DNA, 21 bp, Homo sapiens
cccttcttctratggaaatcc

SEQ ID NO: 11948 - DNA, 21 bp, Homo sapiens
atgtgataacwtatttagttt

SEQ ID NO: 11949 - DNA, 21 bp, Homo sapiens
tgcatttcaargtaaccactc

SEQ ID NO: 11950 - DNA, 21 bp, Homo sapiens
ccttttccacygcctggttct

SEQ ID NO: 11951 - DNA, 21 bp, Homo sapiens
accctctgtamagtcctatat

SEQ ID NO: 11952 - DNA, 21 bp, Homo sapiens
ctgtcttccckgagcaatgct

SEQ ID NO: 11953 - DNA, 21 bp, Homo sapiens
acttgcacttytcagtagcca

SEQ ID NO: 11954 - DNA, 21 bp, Homo sapiens
agacctccttstaaatatgtt

SEQ ID NO: 11955 - DNA, 21 bp, Homo sapiens
tcttctttccrtattctagaa

SEQ ID NO: 11956 - DNA, 21 bp, Homo sapiens
tgacttttagytttggctcat

SEQ ID NO: 11957 - DNA, 21 bp, Homo sapiens
aaaacaagaaragaggcatag

SEQ ID NO: 11958 - DNA, 21 bp, Homo sapiens
tcctagaacascgtcatgtgc

SEQ ID NO: 11959 - DNA, 21 bp, Homo sapiens
ctaaaagatayagactgtcca

SEQ ID NO: 11960 - DNA, 21 bp, Homo sapiens
ataaaataaakcagaatggtg

SEQ ID NO: 11961 - DNA, 21 bp, Homo sapiens
tgcaagtgccrtgcgctattc

SEQ ID NO: 11962 - DNA, 21 bp, Homo sapiens
tagaagctgcrgacagtcttt

SEQ ID NO: 11963 - DNA, 21 bp, Homo sapiens
tcttcttcctkcattagatca

SEQ ID NO: 11964 - DNA, 21 bp, Homo sapiens
tctgggttgcraatgaattta

SEQ ID NO: 11965 - DNA, 21 bp, Homo sapiens
gattatctagyttttcaagtg

SEQ ID NO: 11966 - DNA, 21 bp, Homo sapiens
gagcaactaayttaatctcta

SEQ ID NO: 11967 - DNA, 21 bp, Homo sapiens
ccaggaaatgwccataagcag

SEQ ID NO: 11968 - DNA, 21 bp, Homo sapiens
ttatgccaagragtgaaggga

SEQ ID NO: 11969 - DNA, 21 bp, Homo sapiens
tatgctttcayattcggaaat

SEQ ID NO: 11970 - DNA, 21 bp, Homo sapiens
accctgaattrtcactcaaat

SEQ ID NO: 11971 - DNA, 21 bp, Homo sapiens
tctagaaaatkctgcgccttc

SEQ ID NO: 11972 - DNA, 21 bp, Homo sapiens
cagttagttcytacctatatg

SEQ ID NO: 11973 - DNA, 21 bp, Homo sapiens
atagaagacarctccgtattt

SEQ ID NO: 11974 - DNA, 21 bp, Homo sapiens
gcacattcccrtgctaaagaa

SEQ ID NO: 11975 - DNA, 21 bp, Homo sapiens
catcttcttaytctgtcgtga

SEQ ID NO: 11976 - DNA, 21 bp, Homo sapiens
atttctcttgyaaaaaccttc

SEQ ID NO: 11977 - DNA, 21 bp, Homo sapiens
caggaagctaygaaataaaga

SEQ ID NO: 11978 - DNA, 21 bp, Homo sapiens
cacattgctcrtaattctgat

SEQ ID NO: 11979 - DNA, 21 bp, Homo sapiens
tttggagaagrcagaagctat

SEQ ID NO: 11980 - DNA, 21 bp, Homo sapiens
gtgaaatagtwtccattgcat

SEQ ID NO: 11981 - DNA, 21 bp, Homo sapiens
tcatggtacamggccaagaaa

SEQ ID NO: 11982 - DNA, 21 bp, Homo sapiens
ggatttaatayatgacttctg

SEQ ID NO: 11983 - DNA, 21 bp, Homo sapiens
agtgctagttrgatgtgaaag

SEQ ID NO: 11984 - DNA, 21 bp, Homo sapiens
gtgaaaaaatygttggcatct

SEQ ID NO: 11985 - DNA, 21 bp, Homo sapiens
gaacaaaaatygcctcttgat

SEQ ID NO: 11986 - DNA, 21 bp, Homo sapiens
ttggatgggaracaaacatac

SEQ ID NO: 11987 - DNA, 21 bp, Homo sapiens
ttgcagcaatrtggtcctaat

SEQ ID NO: 11988 - DNA, 21 bp, Homo sapiens
tagtaaattawcccacaagag

SEQ ID NO: 11989 - DNA, 21 bp, Homo sapiens
ctggggtgaayactcattgtg

SEQ ID NO: 11990 - DNA, 21 bp, Homo sapiens
aacatgttctyatttctcaat

SEQ ID NO: 11991 - DNA, 21 bp, Homo sapiens
tctttaattcrttgtaactgg

SEQ ID NO: 11992 - DNA, 21 bp, Homo sapiens
tcattttggargtacagaagg

SEQ ID NO: 11993 - DNA, 21 bp, Homo sapiens
agttatctaaygctttcaaat

SEQ ID NO: 11994 - DNA, 21 bp, Homo sapiens
atcataatatrcagtttgaac

SEQ ID NO: 11995 - DNA, 21 bp, Homo sapiens
tttcaagggcrgaaaaaggct

SEQ ID NO: 11996 - DNA, 21 bp, Homo sapiens
ctttcttgatrttagtccacg

SEQ ID NO: 11997 - DNA, 21 bp, Homo sapiens
catgtatctaytaatgaacat

SEQ ID NO: 11998 - DNA, 21 bp, Homo sapiens
tttatggtgcyttctatactt

SEQ ID NO: 11999 - DNA, 21 bp, Homo sapiens
gagcaagctcyatacaggaag

SEQ ID NO: 12000 - DNA, 21 bp, Homo sapiens
acattcagggycttatagacg

SEQ ID NO: 12001 - DNA, 21 bp, Homo sapiens
ttttcaaaagractcaaccaa

SEQ ID NO: 12002 - DNA, 21 bp, Homo sapiens
gaaaaggtgaygcaaaaattt

SEQ ID NO: 12003 - DNA, 21 bp, Homo sapiens
tcctcaggccytttcttttcc

SEQ ID NO: 12004 - DNA, 21 bp, Homo sapiens
catagcccaaytactacttga

SEQ ID NO: 12005 - DNA, 21 bp, Homo sapiens
tatattaaaaygaaatggact

SEQ ID NO: 12006 - DNA, 21 bp, Homo sapiens
gtatcccatayagcaagaagt

SEQ ID NO: 12007 - DNA, 21 bp, Homo sapiens
gtgacacagtrtctatactat

SEQ ID NO: 12008 - DNA, 21 bp, Homo sapiens
cttaacttccrgattccacag

SEQ ID NO: 12009 - DNA, 21 bp, Homo sapiens
tgttgccataycactgtgtag

SEQ ID NO: 12010 - DNA, 21 bp, Homo sapiens
ccaacaaaatrgacttacatg

SEQ ID NO: 12011 - DNA, 21 bp, Homo sapiens
ctgttagacaygacacagtct

SEQ ID NO: 12012 - DNA, 21 bp, Homo sapiens
agccatatacrgtcattaaaa

SEQ ID NO: 12013 - DNA, 21 bp, Homo sapiens
gcgacctctcmtaaactttgt

SEQ ID NO: 12014 - DNA, 21 bp, Homo sapiens
caatgatcggmtagtaaagta

SEQ ID NO: 12015 - DNA, 21 bp, Homo sapiens
taaggaattastaggcattta

SEQ ID NO: 12016 - DNA, 21 bp, Homo sapiens
actcaacattrcctaaaaact

SEQ ID NO: 12017 - DNA, 21 bp, Homo sapiens
tcccataatgwatcagcttca

SEQ ID NO: 12018 - DNA, 21 bp, Homo sapiens
agtttatctaygccggcaagc

SEQ ID NO: 12019 - DNA, 21 bp, Homo sapiens
gttcacatagyggtgttatta

SEQ ID NO: 12020 - DNA, 21 bp, Homo sapiens
ggatttcacaytgcaaactaa

SEQ ID NO: 12021 - DNA, 21 bp, Homo sapiens
ccgaattagcrcctaggagac

SEQ ID NO: 12022 - DNA, 21 bp, Homo sapiens
tccattacagyggtcctgagg

SEQ ID NO: 12023 - DNA, 21 bp, Homo sapiens
accaccgcctytgtcaagctg

SEQ ID NO: 12024 - DNA, 21 bp, Homo sapiens
aagagctgtgytaatactttt

SEQ ID NO: 12025 - DNA, 21 bp, Homo sapiens
tttctggctayaagctcattt

SEQ ID NO: 12026 - DNA, 21 bp, Homo sapiens
gggctgacccwggcgatacaa

SEQ ID NO: 12027 - DNA, 21 bp, Homo sapiens
attgactatcytcgtttcctc

SEQ ID NO: 12028 - DNA, 21 bp, Homo sapiens
gagggcactgygggcacttta

SEQ ID NO: 12029 - DNA, 21 bp, Homo sapiens
tcaattaaggrttttatttac

SEQ ID NO: 12030 - DNA, 21 bp, Homo sapiens
tcctagaataygctgaattta

SEQ ID NO: 12031 - DNA, 21 bp, Homo sapiens
gcatatagatygaggccaaca

SEQ ID NO: 12032 - DNA, 21 bp, Homo sapiens
ggaaagtttcytttttggtaa

SEQ ID NO: 12033 - DNA, 21 bp, Homo sapiens
cttttcatatkccttacaagt

SEQ ID NO: 12034 - DNA, 21 bp, Homo sapiens
attcttcatayaaaaacttct

SEQ ID NO: 12035 - DNA, 21 bp, Homo sapiens
ttttctgcagrtattcccagg

SEQ ID NO: 12036 - DNA, 21 bp, Homo sapiens
ctatgcttatygatggcaatc

SEQ ID NO: 12037 - DNA, 21 bp, Homo sapiens
gtctccctcaygctcagtttc

SEQ ID NO: 12038 - DNA, 21 bp, Homo sapiens
tttattttccrtatatttcca

SEQ ID NO: 12039 - DNA, 21 bp, Homo sapiens
attaagaatcygtatactgag

SEQ ID NO: 12040 - DNA, 21 bp, Homo sapiens
cagagtcagtrgggagcaaat

SEQ ID NO: 12041 - DNA, 21 bp, Homo sapiens
acaggacatcrcttatggcaa

SEQ ID NO: 12042 - DNA, 21 bp, Homo sapiens
atgtctgaaayggtgcgagta

SEQ ID NO: 12043 - DNA, 21 bp, Homo sapiens
ggaccacgccyggaaggatgt

SEQ ID NO: 12044 - DNA, 21 bp, Homo sapiens
agtgaccgacygcacccgctg

SEQ ID NO: 12045 - DNA, 21 bp, Homo sapiens
tgagatacttyggagcaacct

SEQ ID NO: 12046 - DNA, 21 bp, Homo sapiens
caagaactgcytgggagatac

SEQ ID NO: 12047 - DNA, 21 bp, Homo sapiens
atccacctggytttgagtaga

SEQ ID NO: 12048 - DNA, 21 bp, Homo sapiens
atctcattcascacttctcct

SEQ ID NO: 12049 - DNA, 21 bp, Homo sapiens
ttcatggcaayagactgctgg

SEQ ID NO: 12050 - DNA, 21 bp, Homo sapiens
ttgcctttgcratcatggtgt

SEQ ID NO: 12051 - DNA, 21 bp, Homo sapiens
catagccaatsctggtccttc

SEQ ID NO: 12052 - DNA, 21 bp, Homo sapiens
caagggttacrctcataaaca

SEQ ID NO: 12053 - DNA, 21 bp, Homo sapiens
aagctcaggtkccagatccct

SEQ ID NO: 12054 - DNA, 21 bp, Homo sapiens
ataacttactkgatgacactt

SEQ ID NO: 12055 - DNA, 21 bp, Homo sapiens
ccacaggagayaattctgtgc

SEQ ID NO: 12056 - DNA, 21 bp, Homo sapiens
gcccttgggtwtcatagagca

SEQ ID NO: 12057 - DNA, 21 bp, Homo sapiens
tgcttgggcgyacccttggcc

SEQ ID NO: 12058 - DNA, 21 bp, Homo sapiens
gtataacacakagggaacctg

SEQ ID NO: 12059 - DNA, 21 bp, Homo sapiens
aaatatttaaygattcttggt

SEQ ID NO: 12060 - DNA, 21 bp, Homo sapiens
ctttgttttcmgaaactactt

SEQ ID NO: 12061 - DNA, 21 bp, Homo sapiens
ctgatagaaarcattcttaaa

SEQ ID NO: 12062 - DNA, 21 bp, Homo sapiens
ctaagattaaytgtaggaggt

SEQ ID NO: 12063 - DNA, 21 bp, Homo sapiens
gagagtaagayttataaacct

SEQ ID NO: 12064 - DNA, 21 bp, Homo sapiens
ctttgtgaacrccggcagtga

SEQ ID NO: 12065 - DNA, 21 bp, Homo sapiens
taatctttttstcactacaga

SEQ ID NO: 12066 - DNA, 21 bp, Homo sapiens
actgtgcatgrcacctacatg

SEQ ID NO: 12067 - DNA, 21 bp, Homo sapiens
gaccctggacycactcagctg

SEQ ID NO: 12068 - DNA, 21 bp, Homo sapiens
aggccctgcawagcttgtaac

SEQ ID NO: 12069 - DNA, 21 bp, Homo sapiens
tcttcatatgrctggttccat

SEQ ID NO: 12070 - DNA, 21 bp, Homo sapiens
caggaacagaygcatttggta

SEQ ID NO: 12071 - DNA, 21 bp, Homo sapiens
ccgcatgatgsagaaatggga

SEQ ID NO: 12072 - DNA, 21 bp, Homo sapiens
gtgggctacakctttcactgt

SEQ ID NO: 12073 - DNA, 21 bp, Homo sapiens
gggaagtttcyggatgtctgc

SEQ ID NO: 12074 - DNA, 21 bp, Homo sapiens
ggatgacatcsatgattctct

SEQ ID NO: 12075 - DNA, 21 bp, Homo sapiens
acagacccatycacagcaggc

SEQ ID NO: 12076 - DNA, 21 bp, Homo sapiens
tctccgcatgygggactctcg

SEQ ID NO: 12077 - DNA, 21 bp, Homo sapiens
attgtattggytacaatggct

SEQ ID NO: 12078 - DNA, 21 bp, Homo sapiens
aaggtataaasgcaaaatatt

SEQ ID NO: 12079 - DNA, 21 bp, Homo sapiens
tagtggtgtayggagatcaat

SEQ ID NO: 12080 - DNA, 21 bp, Homo sapiens
gattaaatcarttggtaaatg

SEQ ID NO: 12081 - DNA, 21 bp, Homo sapiens
caacaaacttygtcaaacttg

SEQ ID NO: 12082 - DNA, 21 bp, Homo sapiens
tctgaggaatmatttgagaaa

SEQ ID NO: 12083 - DNA, 21 bp, Homo sapiens
attgctttaartgcacaattt

SEQ ID NO: 12084 - DNA, 21 bp, Homo sapiens
ctggtgtggcmccatctgaag

SEQ ID NO: 12085 - DNA, 21 bp, Homo sapiens
tgtcctaaacwtagaaaagga

SEQ ID NO: 12086 - DNA, 21 bp, Homo sapiens
ttatatgcacyagaatttctg

SEQ ID NO: 12087 - DNA, 21 bp, Homo sapiens
atgcacatacrcagagaagga

SEQ ID NO: 12088 - DNA, 21 bp, Homo sapiens
tcagctattawgtcttagtca

SEQ ID NO: 12089 - DNA, 21 bp, Homo sapiens
ccaatgaagcmtgaaattatt

SEQ ID NO: 12090 - DNA, 21 bp, Homo sapiens
tcttagttatstttattttat

SEQ ID NO: 12091 - DNA, 21 bp, Homo sapiens
ccacccaataygaaagcaact

SEQ ID NO: 12092 - DNA, 21 bp, Homo sapiens
acaagcaagtmgtagtctgag

SEQ ID NO: 12093 - DNA, 21 bp, Homo sapiens
ttaaatattgyatagaggtca

SEQ ID NO: 12094 - DNA, 21 bp, Homo sapiens
gctgaggtcarggctcagtac

SEQ ID NO: 12095 - DNA, 21 bp, Homo sapiens
ggcacagtagraggtgtggcc

SEQ ID NO: 12096 - DNA, 21 bp, Homo sapiens
atgtcataaasagctaagcct

SEQ ID NO: 12097 - DNA, 21 bp, Homo sapiens
ctagtcaaagstagaaagggc

SEQ ID NO: 12098 - DNA, 21 bp, Homo sapiens
tctgggaccaytggaaaaggg

SEQ ID NO: 12099 - DNA, 21 bp, Homo sapiens
tggcgtaggtrggtggttcta

SEQ ID NO: 12100 - DNA, 21 bp, Homo sapiens
tctgggtaaaygtaaagaaag

SEQ ID NO: 12101 - DNA, 21 bp, Homo sapiens
tgctcaaatcrtaagtgagga

SEQ ID NO: 12102 - DNA, 21 bp, Homo sapiens
gatgaagccartaactgtaag

SEQ ID NO: 12103 - DNA, 21 bp, Homo sapiens
ccacagttggygacgctttca

SEQ ID NO: 12104 - DNA, 21 bp, Homo sapiens
caaaacaggtmttataatcat

SEQ ID NO: 12105 - DNA, 21 bp, Homo sapiens
aattgtaggasgcagagcagc

SEQ ID NO: 12106 - DNA, 21 bp, Homo sapiens
agatgaaagtwtttatcaacc

SEQ ID NO: 12107 - DNA, 21 bp, Homo sapiens
cgaactaggaycttgcatgta

SEQ ID NO: 12108 - DNA, 21 bp, Homo sapiens
actgattacaytgtcgcacag

SEQ ID NO: 12109 - DNA, 21 bp, Homo sapiens
agatacaagtkcacttattgt

SEQ ID NO: 12110 - DNA, 21 bp, Homo sapiens
ctaaaatggtrctttgctata

SEQ ID NO: 12111 - DNA, 21 bp, Homo sapiens
aagcagagcckctctacctga

SEQ ID NO: 12112 - DNA, 21 bp, Homo sapiens
ctctattatgmcatctctttt

SEQ ID NO: 12113 - DNA, 21 bp, Homo sapiens
agaaagatatrcagacaatta

SEQ ID NO: 12114 - DNA, 21 bp, Homo sapiens
tccatttctasagaatccttg

SEQ ID NO: 12115 - DNA, 21 bp, Homo sapiens
atagcatccayatgattctgt

SEQ ID NO: 12116 - DNA, 21 bp, Homo sapiens
taagtaactcyagagcatagg

SEQ ID NO: 12117 - DNA, 21 bp, Homo sapiens
taagcatttcscaattacaat

SEQ ID NO: 12118 - DNA, 21 bp, Homo sapiens
taaaatgaccrataggtataa

SEQ ID NO: 12119 - DNA, 21 bp, Homo sapiens
atcaagttacstatacaagag

SEQ ID NO: 12120 - DNA, 21 bp, Homo sapiens
tattgccatayagggtgattt

SEQ ID NO: 12121 - DNA, 21 bp, Homo sapiens
tcttatgaagwttttattata

SEQ ID NO: 12122 - DNA, 21 bp, Homo sapiens
taatttctggyattatagtga

SEQ ID NO: 12123 - DNA, 21 bp, Homo sapiens
gggccataaarctttcaagaa

SEQ ID NO: 12124 - DNA, 21 bp, Homo sapiens
ttaggtctttrgaggcccctc

SEQ ID NO: 12125 - DNA, 21 bp, Homo sapiens
ctgtgtcttcrgatgcagcct

SEQ ID NO: 12126 - DNA, 21 bp, Homo sapiens
tgagagagaaragccagggtt

SEQ ID NO: 12127 - DNA, 21 bp, Homo sapiens
ctcttgggagkgcatccacat

SEQ ID NO: 12128 - DNA, 21 bp, Homo sapiens
cgcaaaatagrtgttcaacat

SEQ ID NO: 12129 - DNA, 21 bp, Homo sapiens
agcacttgacrtatgacccca

SEQ ID NO: 12130 - DNA, 21 bp, Homo sapiens
ctcagctcccrtttctcatgg

SEQ ID NO: 12131 - DNA, 21 bp, Homo sapiens
ctgttagaaaygcctccaggt

SEQ ID NO: 12132 - DNA, 21 bp, Homo sapiens
acgtctgtctyaagtttcaag

SEQ ID NO: 12133 - DNA, 21 bp, Homo sapiens
tgcatacagtkgctacacctc

SEQ ID NO: 12134 - DNA, 21 bp, Homo sapiens
tgaaaggtggygagtagcggg

SEQ ID NO: 12135 - DNA, 21 bp, Homo sapiens
tgaggctggayggtaaactga

SEQ ID NO: 12136 - DNA, 21 bp, Homo sapiens
acatagtcctycgctccacac

SEQ ID NO: 12137 - DNA, 21 bp, Homo sapiens
aagcctgatarctgtcctaga

SEQ ID NO: 12138 - DNA, 21 bp, Homo sapiens
taaactactgrtggatgctat

SEQ ID NO: 12139 - DNA, 21 bp, Homo sapiens
gtgagtccccrggtcagggca

SEQ ID NO: 12140 - DNA, 21 bp, Homo sapiens
ataattatggygtgcccactc

SEQ ID NO: 12141 - DNA, 21 bp, Homo sapiens
tcagtcttacrgtcaggtaaa

SEQ ID NO: 12142 - DNA, 21 bp, Homo sapiens
acaatgtatayagaactttct

SEQ ID NO: 12143 - DNA, 21 bp, Homo sapiens
tttaaccatcraagaatcatc

SEQ ID NO: 12144 - DNA, 21 bp, Homo sapiens
taacaactgcwtgtaaacgaa

SEQ ID NO: 12145 - DNA, 21 bp, Homo sapiens
tggtatctccrtggtgatgca

SEQ ID NO: 12146 - DNA, 21 bp, Homo sapiens
gctcagtgaaraactcaccat

SEQ ID NO: 12147 - DNA, 21 bp, Homo sapiens
attgctgactyatcggatgcc

SEQ ID NO: 12148 - DNA, 21 bp, Homo sapiens
agttacgcacrtggcgtggca

SEQ ID NO: 12149 - DNA, 21 bp, Homo sapiens
tgaatacacawgaccggtgac

SEQ ID NO: 12150 - DNA, 21 bp, Homo sapiens
tacttgggaastggcggcctc

SEQ ID NO: 12151 - DNA, 21 bp, Homo sapiens
agcttcagtgrgcaaattccg

SEQ ID NO: 12152 - DNA, 21 bp, Homo sapiens
gatatcgtaaraaatactaag

SEQ ID NO: 12153 - DNA, 21 bp, Homo sapiens
agggcttcgarcttatacatg

SEQ ID NO: 12154 - DNA, 21 bp, Homo sapiens
gtagctatccrgagagtttgg

SEQ ID NO: 12155 - DNA, 21 bp, Homo sapiens
ttcccagctgrggacatcacg

SEQ ID NO: 12156 - DNA, 21 bp, Homo sapiens
aagctcttggygggctccagt

SEQ ID NO: 12157 - DNA, 21 bp, Homo sapiens
ccttagggagracacccttct

SEQ ID NO: 12158 - DNA, 21 bp, Homo sapiens
cagggattatrcaagggtaaa

SEQ ID NO: 12159 - DNA, 21 bp, Homo sapiens
ctgaaataatyaaacatgttc

SEQ ID NO: 12160 - DNA, 21 bp, Homo sapiens
ttccatatagyggtcaataag

SEQ ID NO: 12161 - DNA, 21 bp, Homo sapiens
ttgtgtagggsttttaccatc

SEQ ID NO: 12162 - DNA, 21 bp, Homo sapiens
catttatagaytatctgtaag

SEQ ID NO: 12163 - DNA, 21 bp, Homo sapiens
tgaaaacatgrtcagctccat

SEQ ID NO: 12164 - DNA, 21 bp, Homo sapiens
accaagtcctrcaacacaagt

SEQ ID NO: 12165 - DNA, 21 bp, Homo sapiens
cctctcctttkacggcacttc

SEQ ID NO: 12166 - DNA, 21 bp, Homo sapiens
tcgtactttgygttgtgagac

SEQ ID NO: 12167 - DNA, 21 bp, Homo sapiens
ttttctgttaygctgctaatc

SEQ ID NO: 12168 - DNA, 21 bp, Homo sapiens
acttttgtaayatatgactta

SEQ ID NO: 12169 - DNA, 21 bp, Homo sapiens
cgtcatcaggwtgtgaggttt

SEQ ID NO: 12170 - DNA, 21 bp, Homo sapiens
agactggaatraatatgagga

SEQ ID NO: 12171 - DNA, 21 bp, Homo sapiens
tgatttatctmcacagatttc

SEQ ID NO: 12172 - DNA, 21 bp, Homo sapiens
ttgtagctaaytgcaagccca

SEQ ID NO: 12173 - DNA, 21 bp, Homo sapiens
ttctagccctyaaattcatct

SEQ ID NO: 12174 - DNA, 21 bp, Homo sapiens
aaatttcaagrttcatttcat

SEQ ID NO: 12175 - DNA, 21 bp, Homo sapiens
attagaataayattgctgcat

SEQ ID NO: 12176 - DNA, 21 bp, Homo sapiens
tttcacaaacyacctggttta

SEQ ID NO: 12177 - DNA, 21 bp, Homo sapiens
taaagttgtayatgaatatta

SEQ ID NO: 12178 - DNA, 21 bp, Homo sapiens
cagactccagygcactctatc

SEQ ID NO: 12179 - DNA, 21 bp, Homo sapiens
actgtgaattyctgtatagca

SEQ ID NO: 12180 - DNA, 21 bp, Homo sapiens
gaggtgctcartaatattcaa

SEQ ID NO: 12181 - DNA, 21 bp, Homo sapiens
cctctgcagcrttcctgggca

SEQ ID NO: 12182 - DNA, 21 bp, Homo sapiens
aaaaatgtttktgaacacagt

SEQ ID NO: 12183 - DNA, 21 bp, Homo sapiens
ttttaccctaygtttaacttt

SEQ ID NO: 12184 - DNA, 21 bp, Homo sapiens
tgctgattcartgaacttttg

SEQ ID NO: 12185 - DNA, 21 bp, Homo sapiens
cattcaaaggrtgacaggcag

SEQ ID NO: 12186 - DNA, 21 bp, Homo sapiens
gcaagacaggraaatacagtt

SEQ ID NO: 12187 - DNA, 21 bp, Homo sapiens
gtatgttacayccagattatt

SEQ ID NO: 12188 - DNA, 21 bp, Homo sapiens
tatgacagttyctactcatct

SEQ ID NO: 12189 - DNA, 21 bp, Homo sapiens
ggtagaaaatytgagaagtga

SEQ ID NO: 12190 - DNA, 21 bp, Homo sapiens
atttgctggtrcacacaattt

SEQ ID NO: 12191 - DNA, 21 bp, Homo sapiens
agttttccaamatatcttttc

SEQ ID NO: 12192 - DNA, 21 bp, Homo sapiens
aaaagaagcarcaccatatta

SEQ ID NO: 12193 - DNA, 21 bp, Homo sapiens
tttcaggcagstcttttcatt

SEQ ID NO: 12194 - DNA, 21 bp, Homo sapiens
gccttacattwgttactttac

SEQ ID NO: 12195 - DNA, 21 bp, Homo sapiens
aagcccatatygactgtggac

SEQ ID NO: 12196 - DNA, 21 bp, Homo sapiens
tagatgcttcyggctataaga

SEQ ID NO: 12197 - DNA, 21 bp, Homo sapiens
attttggtgcycaggagaaca

SEQ ID NO: 12198 - DNA, 21 bp, Homo sapiens
gtcaagttcayatctagggat

SEQ ID NO: 12199 - DNA, 21 bp, Homo sapiens
aacttcacagrgtcatgcagt

SEQ ID NO: 12200 - DNA, 21 bp, Homo sapiens
aatctttaccraaggtgcaca

SEQ ID NO: 12201 - DNA, 21 bp, Homo sapiens
gtataggtacrcgaaaacagt

SEQ ID NO: 12202 - DNA, 21 bp, Homo sapiens
ggtctggctgrtgctttcaaa

SEQ ID NO: 12203 - DNA, 21 bp, Homo sapiens
tgtaaaacgtygtcatcttca

SEQ ID NO: 12204 - DNA, 21 bp, Homo sapiens
cactcagcacwtaatcatctt

SEQ ID NO: 12205 - DNA, 21 bp, Homo sapiens
ctcctcaaaamcattatcttc

SEQ ID NO: 12206 - DNA, 21 bp, Homo sapiens
gccaaaccagractctatttt

SEQ ID NO: 12207 - DNA, 21 bp, Homo sapiens
acatccttttytccctcttgg

SEQ ID NO: 12208 - DNA, 21 bp, Homo sapiens
tatttcctccrtaattcggta

SEQ ID NO: 12209 - DNA, 21 bp, Homo sapiens
gttggagacaratacatggtt

SEQ ID NO: 12210 - DNA, 21 bp, Homo sapiens
attagtctttsagatgtccct

SEQ ID NO: 12211 - DNA, 21 bp, Homo sapiens
tgagaaggagrtttggcattg

SEQ ID NO: 12212 - DNA, 21 bp, Homo sapiens
ctatttgataycttgttgaat

SEQ ID NO: 12213 - DNA, 21 bp, Homo sapiens
tctcagggtcrtgttctttgg

SEQ ID NO: 12214 - DNA, 21 bp, Homo sapiens
aggtttcaaaytccagtgtgc

SEQ ID NO: 12215 - DNA, 21 bp, Homo sapiens
atttcttttgwcagcttacag

SEQ ID NO: 12216 - DNA, 21 bp, Homo sapiens
ttgctagatasgaatggtggt

SEQ ID NO: 12217 - DNA, 21 bp, Homo sapiens
tctagatacasaaataaagat

SEQ ID NO: 12218 - DNA, 21 bp, Homo sapiens
ttaactttttrttcagaacag

SEQ ID NO: 12219 - DNA, 21 bp, Homo sapiens
tccaagccttygaaatacttg

SEQ ID NO: 12220 - DNA, 21 bp, Homo sapiens
gccttgcaaamatttataaaa

SEQ ID NO: 12221 - DNA, 21 bp, Homo sapiens
ttagagggcartggaaagcat

SEQ ID NO: 12222 - DNA, 21 bp, Homo sapiens
atttctgagcktgaactttcc

SEQ ID NO: 12223 - DNA, 21 bp, Homo sapiens
tttggtacagrttaacttgtt

SEQ ID NO: 12224 - DNA, 21 bp, Homo sapiens
taactgttaayaacgatgatg

SEQ ID NO: 12225 - DNA, 21 bp, Homo sapiens
atgtcaagaaytctgaattag

SEQ ID NO: 12226 - DNA, 21 bp, Homo sapiens
ctttactttgrccccaaatta

SEQ ID NO: 12227 - DNA, 21 bp, Homo sapiens
gacgagaaaarctaaatgtgg

SEQ ID NO: 12228 - DNA, 21 bp, Homo sapiens
agacgagcatygccactcagt

SEQ ID NO: 12229 - DNA, 21 bp, Homo sapiens
agactaaatgmggatttttaa

SEQ ID NO: 12230 - DNA, 21 bp, Homo sapiens
ttatctgtctygctctccata

SEQ ID NO: 12231 - DNA, 21 bp, Homo sapiens
ggaggctcatkgtgtctgcat

SEQ ID NO: 12232 - DNA, 21 bp, Homo sapiens
tgctttatacwttttggaggt

SEQ ID NO: 12233 - DNA, 21 bp, Homo sapiens
ataaacttggraaacacgata

SEQ ID NO: 12234 - DNA, 21 bp, Homo sapiens
aagaaacatgsaattcaagag

SEQ ID NO: 12235 - DNA, 21 bp, Homo sapiens
aaacttgttgrtaccctttga

SEQ ID NO: 12236 - DNA, 21 bp, Homo sapiens
gaccatctcaytcactcacgt

SEQ ID NO: 12237 - DNA, 21 bp, Homo sapiens
acaggtcagcrcggaggactt

SEQ ID NO: 12238 - DNA, 21 bp, Homo sapiens
tgtgtgtttayggtgtttggc

SEQ ID NO: 12239 - DNA, 21 bp, Homo sapiens
gcttccatccyattcttcttc

SEQ ID NO: 12240 - DNA, 21 bp, Homo sapiens
tgtgctagaakgaaccctgca

SEQ ID NO: 12241 - DNA, 21 bp, Homo sapiens
gatctgtattytcacatccct

SEQ ID NO: 12242 - DNA, 21 bp, Homo sapiens
ctgtggaaatrtccaggcaca

SEQ ID NO: 12243 - DNA, 21 bp, Homo sapiens
acttcagttamaagaaaataa

SEQ ID NO: 12244 - DNA, 21 bp, Homo sapiens
gagcaggtgcytactgtatgg

SEQ ID NO: 12245 - DNA, 21 bp, Homo sapiens
attcatgcccragggaatgtt

SEQ ID NO: 12246 - DNA, 21 bp, Homo sapiens
agcactaaatsgcctcccctg

SEQ ID NO: 12247 - DNA, 21 bp, Homo sapiens
ccaaaaaaacygctgtttgaa

SEQ ID NO: 12248 - DNA, 21 bp, Homo sapiens
accaagccttrttatcctggt

SEQ ID NO: 12249 - DNA, 21 bp, Homo sapiens
tttctccataytgtatgttta

SEQ ID NO: 12250 - DNA, 21 bp, Homo sapiens
ggaggtgaagytgttgaaatg

SEQ ID NO: 12251 - DNA, 21 bp, Homo sapiens
acctctgtggrttcctaagta

SEQ ID NO: 12252 - DNA, 21 bp, Homo sapiens
gaatgtttggrgaatttcaat

SEQ ID NO: 12253 - DNA, 21 bp, Homo sapiens
gtgggtaagtwtgtgtgttac

SEQ ID NO: 12254 - DNA, 21 bp, Homo sapiens
acctggttctsaaagacactg

SEQ ID NO: 12255 - DNA, 21 bp, Homo sapiens
atattatctgrcgttttggga

SEQ ID NO: 12256 - DNA, 21 bp, Homo sapiens
tatcaaaagcrctgagcttta

SEQ ID NO: 12257 - DNA, 21 bp, Homo sapiens
ggaacagctcmtaatgacatg

SEQ ID NO: 12258 - DNA, 21 bp, Homo sapiens
ttagacatgtyatgcaacgtc

SEQ ID NO: 12259 - DNA, 21 bp, Homo sapiens
tgtaattaaaygaccattact

SEQ ID NO: 12260 - DNA, 21 bp, Homo sapiens
tatttactgamttctctttct

SEQ ID NO: 12261 - DNA, 21 bp, Homo sapiens
ggcatacaaargtcctcacac

SEQ ID NO: 12262 - DNA, 21 bp, Homo sapiens
acttaggggargcaatgctag

SEQ ID NO: 12263 - DNA, 21 bp, Homo sapiens
tcttcaatccmtaaggtatta

SEQ ID NO: 12264 - DNA, 21 bp, Homo sapiens
cagtataatcyttgcttaaat

SEQ ID NO: 12265 - DNA, 21 bp, Homo sapiens
caactgtaatsatggtactga

SEQ ID NO: 12266 - DNA, 21 bp, Homo sapiens
cagcattgctrtagtatgtca

SEQ ID NO: 12267 - DNA, 21 bp, Homo sapiens
agctgaaatgyacagagacct

SEQ ID NO: 12268 - DNA, 21 bp, Homo sapiens
gccagctcttkggagttctgc

SEQ ID NO: 12269 - DNA, 21 bp, Homo sapiens
catgccacackgtattttctg

SEQ ID NO: 12270 - DNA, 21 bp, Homo sapiens
ggcatatttamatgaatggtt

SEQ ID NO: 12271 - DNA, 21 bp, Homo sapiens
atgttgttacygtaccttaga

SEQ ID NO: 12272 - DNA, 21 bp, Homo sapiens
gacttgacctyggaggagatc

SEQ ID NO: 12273 - DNA, 21 bp, Homo sapiens
tgaagaactamgatggaatga

SEQ ID NO: 12274 - DNA, 21 bp, Homo sapiens
gtcgtctgatrtaacttgcca

SEQ ID NO: 12275 - DNA, 21 bp, Homo sapiens
cagcttagtastttttttcta

SEQ ID NO: 12276 - DNA, 21 bp, Homo sapiens
tctaggatacycctaccttga

SEQ ID NO: 12277 - DNA, 21 bp, Homo sapiens
tcttcaatatscgagctaaat

SEQ ID NO: 12278 - DNA, 21 bp, Homo sapiens
actgccctctrgtgtcacttt

SEQ ID NO: 12279 - DNA, 21 bp, Homo sapiens
accctgctacytaggacctag

SEQ ID NO: 12280 - DNA, 21 bp, Homo sapiens
ccttaggagayacccagtaca

SEQ ID NO: 12281 - DNA, 21 bp, Homo sapiens
gataaaggccrctgatcattg

SEQ ID NO: 12282 - DNA, 21 bp, Homo sapiens
ggaaagtagcrtttacaccat

SEQ ID NO: 12283 - DNA, 21 bp, Homo sapiens
agtcggaatcraaccagcacc

SEQ ID NO: 12284 - DNA, 21 bp, Homo sapiens
aaagggaggtratacaggatt

SEQ ID NO: 12285 - DNA, 21 bp, Homo sapiens
ggagttatctmcccacatggc

SEQ ID NO: 12286 - DNA, 21 bp, Homo sapiens
acgtgatgctrtgcaaaggct

SEQ ID NO: 12287 - DNA, 21 bp, Homo sapiens
atcatattgtytttccagtga

SEQ ID NO: 12288 - DNA, 21 bp, Homo sapiens
cgatttgtctyggcacgaatc

SEQ ID NO: 12289 - DNA, 21 bp, Homo sapiens
tgtcagaaatmagtctgctca

SEQ ID NO: 12290 - DNA, 21 bp, Homo sapiens
tccgagaaacwtcatgtctac

SEQ ID NO: 12291 - DNA, 21 bp, Homo sapiens
aaggacaactragtggaaata

SEQ ID NO: 12292 - DNA, 21 bp, Homo sapiens
cttatcacttygttgttctat

SEQ ID NO: 12293 - DNA, 21 bp, Homo sapiens
gtttgtctaasaataaagagg

SEQ ID NO: 12294 - DNA, 21 bp, Homo sapiens
ctttgttgccmttttatatat

SEQ ID NO: 12295 - DNA, 21 bp, Homo sapiens
atactgtagcytgagtgactt

SEQ ID NO: 12296 - DNA, 21 bp, Homo sapiens
atgcagtggayggaagaagga

SEQ ID NO: 12297 - DNA, 21 bp, Homo sapiens
tctttctactsaggttcattg

SEQ ID NO: 12298 - DNA, 21 bp, Homo sapiens
gtatagcccaygctaagcttt

SEQ ID NO: 12299 - DNA, 21 bp, Homo sapiens
agagtgacttyagtctgttcc

SEQ ID NO: 12300 - DNA, 21 bp, Homo sapiens
atgaagtcatytggacaggtt

SEQ ID NO: 12301 - DNA, 21 bp, Homo sapiens
gaagccgattmctctggctag

SEQ ID NO: 12302 - DNA, 21 bp, Homo sapiens
agtttaaaagrtatttcacct

SEQ ID NO: 12303 - DNA, 21 bp, Homo sapiens
ggttcctggtyttcagtagca

SEQ ID NO: 12304 - DNA, 21 bp, Homo sapiens
atcttctaacyagaggagagt

SEQ ID NO: 12305 - DNA, 21 bp, Homo sapiens
ctgtccaatayagttcctgcc

SEQ ID NO: 12306 - DNA, 21 bp, Homo sapiens
taacatgtccytgacacttga

SEQ ID NO: 12307 - DNA, 21 bp, Homo sapiens
cgtcttctatwtgacagggga

SEQ ID NO: 12308 - DNA, 21 bp, Homo sapiens
ttgagtgaatrgctgctgaaa

SEQ ID NO: 12309 - DNA, 21 bp, Homo sapiens
aattgctttcyaaatccaacg

SEQ ID NO: 12310 - DNA, 21 bp, Homo sapiens
ggtagcttacyagtactttcc

SEQ ID NO: 12311 - DNA, 21 bp, Homo sapiens
cacaatagaaraaaacatcag

SEQ ID NO: 12312 - DNA, 21 bp, Homo sapiens
tgctcaacaaygagtaagggc

SEQ ID NO: 12313 - DNA, 21 bp, Homo sapiens
tcagacagatwagcaaagact

SEQ ID NO: 12314 - DNA, 21 bp, Homo sapiens
agaggaaatckgtgcaaatcc

SEQ ID NO: 12315 - DNA, 21 bp, Homo sapiens
aaatcaccttyttggccgggt

SEQ ID NO: 12316 - DNA, 21 bp, Homo sapiens
gttgatctgtytgtatactcc

SEQ ID NO: 12317 - DNA, 21 bp, Homo sapiens
cctttgaataycctcgttttg

SEQ ID NO: 12318 - DNA, 21 bp, Homo sapiens
aagtgtcctgmtttcacagat

SEQ ID NO: 12319 - DNA, 21 bp, Homo sapiens
ctgtctagtaytcaggaaatg

SEQ ID NO: 12320 - DNA, 21 bp, Homo sapiens
tttcaataaawataggaagca

SEQ ID NO: 12321 - DNA, 21 bp, Homo sapiens
tgattgttctrgtggatgaac

SEQ ID NO: 12322 - DNA, 21 bp, Homo sapiens
agtcaacttgrttacacacag

SEQ ID NO: 12323 - DNA, 21 bp, Homo sapiens
gtaaagtaagyagtgaaacaa

SEQ ID NO: 12324 - DNA, 21 bp, Homo sapiens
tttcaggtagygacagagcag

SEQ ID NO: 12325 - DNA, 21 bp, Homo sapiens
ctccacatctsaatttctact

SEQ ID NO: 12326 - DNA, 21 bp, Homo sapiens
aaatgctcackctaaatggca

SEQ ID NO: 12327 - DNA, 21 bp, Homo sapiens
agattatttartgaaaccaat

SEQ ID NO: 12328 - DNA, 21 bp, Homo sapiens
cattttacttwtggtgaccat

SEQ ID NO: 12329 - DNA, 21 bp, Homo sapiens
tggagtcattsaatcacccaa

SEQ ID NO: 12330 - DNA, 21 bp, Homo sapiens
ttgaaagttgkgtaaagcatc

SEQ ID NO: 12331 - DNA, 21 bp, Homo sapiens
ctatatgctaygtttatatgt

SEQ ID NO: 12332 - DNA, 21 bp, Homo sapiens
tccacagtatyggtcaattaa

SEQ ID NO: 12333 - DNA, 21 bp, Homo sapiens
gaagcagtatrgacttttaaa

SEQ ID NO: 12334 - DNA, 21 bp, Homo sapiens
ttgggaaatgyggataatacc

SEQ ID NO: 12335 - DNA, 21 bp, Homo sapiens
aggacctgttyctaaaataac

SEQ ID NO: 12336 - DNA, 21 bp, Homo sapiens
tgaactgagcmgaagctttta

SEQ ID NO: 12337 - DNA, 21 bp, Homo sapiens
aattgtctagrcatcttgcag

SEQ ID NO: 12338 - DNA, 21 bp, Homo sapiens
actggttactygctgatctct

SEQ ID NO: 12339 - DNA, 21 bp, Homo sapiens
atgacattgcragtagaagct

SEQ ID NO: 12340 - DNA, 21 bp, Homo sapiens
agaagcaatartaagacccta

SEQ ID NO: 12341 - DNA, 21 bp, Homo sapiens
acccttttttytgaagaccaa

SEQ ID NO: 12342 - DNA, 21 bp, Homo sapiens
aaaaaatgagrttaaaaaaca

SEQ ID NO: 12343 - DNA, 21 bp, Homo sapiens
aacatttgatycctaactgtg

SEQ ID NO: 12344 - DNA, 21 bp, Homo sapiens
caaaggaagayctgtagacat

SEQ ID NO: 12345 - DNA, 21 bp, Homo sapiens
caattcatatwccaggagcac

SEQ ID NO: 12346 - DNA, 21 bp, Homo sapiens
cctcttagtgyttccccagcc

SEQ ID NO: 12347 - DNA, 21 bp, Homo sapiens
cctagggcacrctcaatatat

SEQ ID NO: 12348 - DNA, 21 bp, Homo sapiens
gcatttcacayggagagaggg

SEQ ID NO: 12349 - DNA, 21 bp, Homo sapiens
gggagtgggcmaaatgactta

SEQ ID NO: 12350 - DNA, 21 bp, Homo sapiens
ggaagcatctrctataaaacc

SEQ ID NO: 12351 - DNA, 21 bp, Homo sapiens
agcctgccatytcatggtgga

SEQ ID NO: 12352 - DNA, 21 bp, Homo sapiens
taccagatttsatggttgatt

SEQ ID NO: 12353 - DNA, 21 bp, Homo sapiens
acagtcatttytcagctattg

SEQ ID NO: 12354 - DNA, 21 bp, Homo sapiens
atagcttcatycacagggaca

SEQ ID NO: 12355 - DNA, 21 bp, Homo sapiens
aggaaagtcaygggactgcca

SEQ ID NO: 12356 - DNA, 21 bp, Homo sapiens
agatctcacaracaagacaca

SEQ ID NO: 12357 - DNA, 21 bp, Homo sapiens
ctaaatagagyctacttccca

SEQ ID NO: 12358 - DNA, 21 bp, Homo sapiens
tgttgaaatgraaacacacac

SEQ ID NO: 12359 - DNA, 21 bp, Homo sapiens
cagtttagttrgtttagtcag

SEQ ID NO: 12360 - DNA, 21 bp, Homo sapiens
tgaaagaatcrcttcatggag

SEQ ID NO: 12361 - DNA, 21 bp, Homo sapiens
tccaaataaayagacccatgg

SEQ ID NO: 12362 - DNA, 21 bp, Homo sapiens
tgtgtggcagrcctttaggaa

SEQ ID NO: 12363 - DNA, 21 bp, Homo sapiens
agcatgccccrcctgaatatg

SEQ ID NO: 12364 - DNA, 21 bp, Homo sapiens
agtgaagtccmgatataacag

SEQ ID NO: 12365 - DNA, 21 bp, Homo sapiens
tctaatttccrtttatcctgc

SEQ ID NO: 12366 - DNA, 21 bp, Homo sapiens
gcttacatacrcaagggtttg

SEQ ID NO: 12367 - DNA, 21 bp, Homo sapiens
gatgacatttygtctgttttc

SEQ ID NO: 12368 - DNA, 21 bp, Homo sapiens
ttttacaaagyctgtgttaga

SEQ ID NO: 12369 - DNA, 21 bp, Homo sapiens
tggtgtctcgyaccgccagct

SEQ ID NO: 12370 - DNA, 21 bp, Homo sapiens
ggaatgctggyggacttggct

SEQ ID NO: 12371 - DNA, 21 bp, Homo sapiens
gcctgcccaaygcttgtccct

SEQ ID NO: 12372 - DNA, 21 bp, Homo sapiens
ggctgttactyttttctgtgt

SEQ ID NO: 12373 - DNA, 21 bp, Homo sapiens
tagtatgtgayaggagcctcg

SEQ ID NO: 12374 - DNA, 21 bp, Homo sapiens
gctggtgaagyatacatcctg

SEQ ID NO: 12375 - DNA, 21 bp, Homo sapiens
cagattcaatyctagaacttt

SEQ ID NO: 12376 - DNA, 21 bp, Homo sapiens
ttgtgccagcrttatgaggac

SEQ ID NO: 12377 - DNA, 21 bp, Homo sapiens
ctccagtcagkttaaggggtc

SEQ ID NO: 12378 - DNA, 21 bp, Homo sapiens
ttgccttatckggggtgcaca

SEQ ID NO: 12379 - DNA, 21 bp, Homo sapiens
gtttatgtctrtagatggata

SEQ ID NO: 12380 - DNA, 21 bp, Homo sapiens
agtacccttaytccatctccc

SEQ ID NO: 12381 - DNA, 21 bp, Homo sapiens
tttttattgtrtctgtatcct

SEQ ID NO: 12382 - DNA, 21 bp, Homo sapiens
ctgtcaatcargagagtgaaa

SEQ ID NO: 12383 - DNA, 21 bp, Homo sapiens
agagagtttgrgaatcaatgc

SEQ ID NO: 12384 - DNA, 21 bp, Homo sapiens
tatccaaagaytgcatttctg

SEQ ID NO: 12385 - DNA, 21 bp, Homo sapiens
gcgtccataaycttaattcat

SEQ ID NO: 12386 - DNA, 21 bp, Homo sapiens
gagaaggaggstgatgtcaaa

SEQ ID NO: 12387 - DNA, 21 bp, Homo sapiens
gtcacatcacytataaaagtt

SEQ ID NO: 12388 - DNA, 21 bp, Homo sapiens
atcagtaccaytaagatcatt

SEQ ID NO: 12389 - DNA, 21 bp, Homo sapiens
tctttgtaaaygaatcatcac

SEQ ID NO: 12390 - DNA, 21 bp, Homo sapiens
tgtaccatcayccacttcttt

SEQ ID NO: 12391 - DNA, 21 bp, Homo sapiens
tgatgtgcttsacagcccttg

SEQ ID NO: 12392 - DNA, 21 bp, Homo sapiens
acaactcataygaagattttt

SEQ ID NO: 12393 - DNA, 21 bp, Homo sapiens
ttcttagcctrgcaggaaaca

SEQ ID NO: 12394 - DNA, 21 bp, Homo sapiens
ttctcatttgratagttatga

SEQ ID NO: 12395 - DNA, 21 bp, Homo sapiens
gaatagaaacwagttggtcac

SEQ ID NO: 12396 - DNA, 21 bp, Homo sapiens
aaagctgggaragaggatatg

SEQ ID NO: 12397 - DNA, 21 bp, Homo sapiens
ataataaaaasccaggaagca

SEQ ID NO: 12398 - DNA, 21 bp, Homo sapiens
catagtaacasagacacaatt

SEQ ID NO: 12399 - DNA, 21 bp, Homo sapiens
tggggagatartatttcttct

SEQ ID NO: 12400 - DNA, 21 bp, Homo sapiens
tcctgtctggrttctgaggat

SEQ ID NO: 12401 - DNA, 21 bp, Homo sapiens
gaaatgtagcyagaacatatt

SEQ ID NO: 12402 - DNA, 21 bp, Homo sapiens
ctaggggatcrcatttaagcc

SEQ ID NO: 12403 - DNA, 21 bp, Homo sapiens
atattgagcayttttccacga

SEQ ID NO: 12404 - DNA, 21 bp, Homo sapiens
ttggcattcaragaaatacaa

SEQ ID NO: 12405 - DNA, 21 bp, Homo sapiens
ttcttgggatmgttcattctg

SEQ ID NO: 12406 - DNA, 21 bp, Homo sapiens
cactgcagggytacagggatg

SEQ ID NO: 12407 - DNA, 21 bp, Homo sapiens
gtgttgcctcyttctgactca

SEQ ID NO: 12408 - DNA, 21 bp, Homo sapiens
cagaatgtagrtacatatagg

SEQ ID NO: 12409 - DNA, 21 bp, Homo sapiens
ctctgtggcayaaattacaca

SEQ ID NO: 12410 - DNA, 21 bp, Homo sapiens
taaagcaggtktcaagctgcc

SEQ ID NO: 12411 - DNA, 21 bp, Homo sapiens
tgtgtgttccyagatctgaga

SEQ ID NO: 12412 - DNA, 21 bp, Homo sapiens
ttcctccaagyggaggctgag

SEQ ID NO: 12413 - DNA, 21 bp, Homo sapiens
atagaggaagstcttttaata

SEQ ID NO: 12414 - DNA, 21 bp, Homo sapiens
attggaatgcytcttcataca

SEQ ID NO: 12415 - DNA, 21 bp, Homo sapiens
ctcacttcccrtaactgctga

SEQ ID NO: 12416 - DNA, 21 bp, Homo sapiens
accatggcttmaagtggagga

SEQ ID NO: 12417 - DNA, 21 bp, Homo sapiens
ttcatagtaartaaacttgct

SEQ ID NO: 12418 - DNA, 21 bp, Homo sapiens
catgaatgggkccaacatgaa

SEQ ID NO: 12419 - DNA, 21 bp, Homo sapiens
caggagaaaarctgtccctgg

SEQ ID NO: 12420 - DNA, 21 bp, Homo sapiens
ccagaagaaakaacagtatgt

SEQ ID NO: 12421 - DNA, 21 bp, Homo sapiens
tatatgtgagyctagaggtaa

SEQ ID NO: 12422 - DNA, 21 bp, Homo sapiens
ggttgctccaygaagaaaaga

SEQ ID NO: 12423 - DNA, 21 bp, Homo sapiens
cccaatgccayacactgagcg

SEQ ID NO: 12424 - DNA, 21 bp, Homo sapiens
agttgccattygcttgtcacc

SEQ ID NO: 12425 - DNA, 21 bp, Homo sapiens
gacaataccawgttcatgcta

SEQ ID NO: 12426 - DNA, 21 bp, Homo sapiens
tgctgtgtcawagtctgtatc

SEQ ID NO: 12427 - DNA, 21 bp, Homo sapiens
gacaattcacractcaccagg

SEQ ID NO: 12428 - DNA, 21 bp, Homo sapiens
tattaaagatytgatacattt

SEQ ID NO: 12429 - DNA, 21 bp, Homo sapiens
tttttctacasaattgcacat

SEQ ID NO: 12430 - DNA, 21 bp, Homo sapiens
cctttgtcttktcttagcatc

SEQ ID NO: 12431 - DNA, 21 bp, Homo sapiens
actttgtatayatgaacctaa

SEQ ID NO: 12432 - DNA, 21 bp, Homo sapiens
tcacatcaaaytgataaaaat

SEQ ID NO: 12433 - DNA, 21 bp, Homo sapiens
gagctgcatgytgccctccat

SEQ ID NO: 12434 - DNA, 21 bp, Homo sapiens
accagtaagtmtcaagcaagt

SEQ ID NO: 12435 - DNA, 21 bp, Homo sapiens
atcaggcaggrtacgttacaa

SEQ ID NO: 12436 - DNA, 21 bp, Homo sapiens
gcattaacttrgcgcccgggg

SEQ ID NO: 12437 - DNA, 21 bp, Homo sapiens
ttgccccctcrtggcagtctc

SEQ ID NO: 12438 - DNA, 21 bp, Homo sapiens
tagtgaagagrggtctaaagt

SEQ ID NO: 12439 - DNA, 21 bp, Homo sapiens
ccacatactcmacatgcattt

SEQ ID NO: 12440 - DNA, 21 bp, Homo sapiens
tttagggaagraaatgactgt

SEQ ID NO: 12441 - DNA, 21 bp, Homo sapiens
gctttgcgtaygattgtgttt

SEQ ID NO: 12442 - DNA, 21 bp, Homo sapiens
aacacagataygaaaataata

SEQ ID NO: 12443 - DNA, 21 bp, Homo sapiens
tcacctgtgtyacccttacct

SEQ ID NO: 12444 - DNA, 21 bp, Homo sapiens
aactgatgttkctgtcccttt

SEQ ID NO: 12445 - DNA, 21 bp, Homo sapiens
gtttccacaaygaagagaaaa

SEQ ID NO: 12446 - DNA, 21 bp, Homo sapiens
ttaaatgaagrggctcatatt

SEQ ID NO: 12447 - DNA, 21 bp, Homo sapiens
tagctcacatytgatggttac

SEQ ID NO: 12448 - DNA, 21 bp, Homo sapiens
caaagggctastgttgcatgg

SEQ ID NO: 12449 - DNA, 21 bp, Homo sapiens
agaggtgaaayaggctcatcc

SEQ ID NO: 12450 - DNA, 21 bp, Homo sapiens
tcgttcctttytcaaactctt

SEQ ID NO: 12451 - DNA, 21 bp, Homo sapiens
gatttcctgayttcctgaaat

SEQ ID NO: 12452 - DNA, 21 bp, Homo sapiens
tctggtagcaygtgttctagc

SEQ ID NO: 12453 - DNA, 21 bp, Homo sapiens
tggtcaagaayggcgtcatgg

SEQ ID NO: 12454 - DNA, 21 bp, Homo sapiens
agttcacctcrtagtaacaca

SEQ ID NO: 12455 - DNA, 21 bp, Homo sapiens
tcaaaccccgrgaactagaca

SEQ ID NO: 12456 - DNA, 21 bp, Homo sapiens
gacacactatrtgctaaatat

SEQ ID NO: 12457 - DNA, 21 bp, Homo sapiens
tctgcacagtsctcttgtctg

SEQ ID NO: 12458 - DNA, 21 bp, Homo sapiens
ttggagctggmagttcctggg

SEQ ID NO: 12459 - DNA, 21 bp, Homo sapiens
cctgagactcygaggaccaaa

SEQ ID NO: 12460 - DNA, 21 bp, Homo sapiens
gatgaaaggcrctctccgtgg

SEQ ID NO: 12461 - DNA, 21 bp, Homo sapiens
gcttaaaagcmagggtgcagt

SEQ ID NO: 12462 - DNA, 21 bp, Homo sapiens
gtatatttgcygcttccccaa

SEQ ID NO: 12463 - DNA, 21 bp, Homo sapiens
attttgaagtwttcatgcaag

SEQ ID NO: 12464 - DNA, 21 bp, Homo sapiens
acagtgctggyccctggtcta

SEQ ID NO: 12465 - DNA, 21 bp, Homo sapiens
acactgagaaraagtatgggc

SEQ ID NO: 12466 - DNA, 21 bp, Homo sapiens
agtgtagatcraataagcatt

SEQ ID NO: 12467 - DNA, 21 bp, Homo sapiens
ggggtccattrttcctatcag

SEQ ID NO: 12468 - DNA, 21 bp, Homo sapiens
cttactataayactaggcagt

SEQ ID NO: 12469 - DNA, 21 bp, Homo sapiens
cagaaaacacrcaaggctggg

SEQ ID NO: 12470 - DNA, 21 bp, Homo sapiens
gttcatacgcrgtacaagaag

SEQ ID NO: 12471 - DNA, 21 bp, Homo sapiens
tgttatccctkcataaacact

SEQ ID NO: 12472 - DNA, 21 bp, Homo sapiens
ggaagagcccrgtgagaagga

SEQ ID NO: 12473 - DNA, 21 bp, Homo sapiens
tccacaacaartttataatca

SEQ ID NO: 12474 - DNA, 21 bp, Homo sapiens
aagaaaacccrcaaaaatgat

SEQ ID NO: 12475 - DNA, 21 bp, Homo sapiens
ctctgtgcacygtctcttaca

SEQ ID NO: 12476 - DNA, 21 bp, Homo sapiens
tattgtttggyatcattctgg

SEQ ID NO: 12477 - DNA, 21 bp, Homo sapiens
aatggaagtawaaaaacagtt

SEQ ID NO: 12478 - DNA, 21 bp, Homo sapiens
agtggaccttrgcaatgacag

SEQ ID NO: 12479 - DNA, 21 bp, Homo sapiens
tttgtttaatsagctcctgga

SEQ ID NO: 12480 - DNA, 21 bp, Homo sapiens
gcaggacttcrtctcatggta

SEQ ID NO: 12481 - DNA, 21 bp, Homo sapiens
tttaagtgctrtggatcacca

SEQ ID NO: 12482 - DNA, 21 bp, Homo sapiens
tcgttcaaacrttcagccaaa

SEQ ID NO: 12483 - DNA, 21 bp, Homo sapiens
ctaccagcatycatactaatc

SEQ ID NO: 12484 - DNA, 21 bp, Homo sapiens
ccctggaaacrttgctattca

SEQ ID NO: 12485 - DNA, 21 bp, Homo sapiens
tggaaggagcygggttctaaa

SEQ ID NO: 12486 - DNA, 21 bp, Homo sapiens
gcctgtgtgcrgaagtatagt

SEQ ID NO: 12487 - DNA, 21 bp, Homo sapiens
caggtacatarcactttacaa

SEQ ID NO: 12488 - DNA, 21 bp, Homo sapiens
acctttcctcyagttttttcc

SEQ ID NO: 12489 - DNA, 21 bp, Homo sapiens
caaaagctgtygaatccttct

SEQ ID NO: 12490 - DNA, 21 bp, Homo sapiens
gcgacacgttytgtgggaccc

SEQ ID NO: 12491 - DNA, 21 bp, Homo sapiens
catttcatcartagtccctgg

SEQ ID NO: 12492 - DNA, 21 bp, Homo sapiens
tgtagacatgwttcccgccta

SEQ ID NO: 12493 - DNA, 21 bp, Homo sapiens
ttctctcttaygcttctgtag

SEQ ID NO: 12494 - DNA, 21 bp, Homo sapiens
gactccaggargaaatgaggg

SEQ ID NO: 12495 - DNA, 21 bp, Homo sapiens
acagaggagamagagcccagg

SEQ ID NO: 12496 - DNA, 21 bp, Homo sapiens
gagaagtgggrtcataaaatc

SEQ ID NO: 12497 - DNA, 21 bp, Homo sapiens
caatgtttttycatggtgaga

SEQ ID NO: 12498 - DNA, 21 bp, Homo sapiens
gccttagaagsagatttggat

SEQ ID NO: 12499 - DNA, 21 bp, Homo sapiens
attcacctttktaatctgtcc

SEQ ID NO: 12500 - DNA, 21 bp, Homo sapiens
tggaaaaagcrttattgaaaa

SEQ ID NO: 12501 - DNA, 21 bp, Homo sapiens
aaggggtaacrtgtatgagtg

SEQ ID NO: 12502 - DNA, 21 bp, Homo sapiens
gctatattctyctgttcttaa

SEQ ID NO: 12503 - DNA, 21 bp, Homo sapiens
agtagatcttrttattactgc

SEQ ID NO: 12504 - DNA, 21 bp, Homo sapiens
gtagagtgtgygctctgcctt

SEQ ID NO: 12505 - DNA, 21 bp, Homo sapiens
tttgggaattkccctcctccg

SEQ ID NO: 12506 - DNA, 21 bp, Homo sapiens
tgggttcaaaycccagatgta

SEQ ID NO: 12507 - DNA, 21 bp, Homo sapiens
aaaaacagtgragtattttaa

SEQ ID NO: 12508 - DNA, 21 bp, Homo sapiens
cttttcagctytcatcccttt

SEQ ID NO: 12509 - DNA, 21 bp, Homo sapiens
ttgtgtaaaayaaaccataca

SEQ ID NO: 12510 - DNA, 21 bp, Homo sapiens
atatgtttcaytgcaaaccca

SEQ ID NO: 12511 - DNA, 21 bp, Homo sapiens
gtattgtcacrtaggtttgaa

SEQ ID NO: 12512 - DNA, 21 bp, Homo sapiens
tgccatacctkttatgttatc

SEQ ID NO: 12513 - DNA, 21 bp, Homo sapiens
aggtttttccyacccctactt

SEQ ID NO: 12514 - DNA, 21 bp, Homo sapiens
ccacttaatgytaaacttgga

SEQ ID NO: 12515 - DNA, 21 bp, Homo sapiens
ggttcacaatkaacatattct

SEQ ID NO: 12516 - DNA, 21 bp, Homo sapiens
aaaagctctgkccccaggaat

SEQ ID NO: 12517 - DNA, 21 bp, Homo sapiens
ctggatggtamgagactcata

SEQ ID NO: 12518 - DNA, 21 bp, Homo sapiens
atcagtgtgtyccacttaggt

SEQ ID NO: 12519 - DNA, 21 bp, Homo sapiens
tgattggaatygacgcagatc

SEQ ID NO: 12520 - DNA, 21 bp, Homo sapiens
tgcacttaccsatgatttcat

SEQ ID NO: 12521 - DNA, 21 bp, Homo sapiens
tatcatcattytgaaaaaacc

SEQ ID NO: 12522 - DNA, 21 bp, Homo sapiens
catgaaatatkagtatgcagg

SEQ ID NO: 12523 - DNA, 21 bp, Homo sapiens
ccaagttttcrtagccctgta

SEQ ID NO: 12524 - DNA, 21 bp, Homo sapiens
tggagggggcratattggagc

SEQ ID NO: 12525 - DNA, 21 bp, Homo sapiens
cctcagctcaraaaccctcta

SEQ ID NO: 12526 - DNA, 21 bp, Homo sapiens
tgtttgccatkaagtcacaac

SEQ ID NO: 12527 - DNA, 21 bp, Homo sapiens
ttgtatctttyttccaaggtt

SEQ ID NO: 12528 - DNA, 21 bp, Homo sapiens
tgcagaatcascgttggtaca

SEQ ID NO: 12529 - DNA, 21 bp, Homo sapiens
tcaaaatgcayaaggaaaccc

SEQ ID NO: 12530 - DNA, 21 bp, Homo sapiens
tgaagcaaatstcacattaat

SEQ ID NO: 12531 - DNA, 21 bp, Homo sapiens
ttaacctttaygttttgatgt

SEQ ID NO: 12532 - DNA, 21 bp, Homo sapiens
gcattttaaaycatcattgtc

SEQ ID NO: 12533 - DNA, 21 bp, Homo sapiens
catttcaactrtgtacactta

SEQ ID NO: 12534 - DNA, 21 bp, Homo sapiens
aactaaattayctggacatat

SEQ ID NO: 12535 - DNA, 21 bp, Homo sapiens
ctaaaggagayggttgggtaa

SEQ ID NO: 12536 - DNA, 21 bp, Homo sapiens
aacaaaaatgrtctcaaaagt

SEQ ID NO: 12537 - DNA, 21 bp, Homo sapiens
atgaacttggygtcagagtca

SEQ ID NO: 12538 - DNA, 21 bp, Homo sapiens
gagctgactcygtgtgaataa

SEQ ID NO: 12539 - DNA, 21 bp, Homo sapiens
tccgtacagcwtggaaaaata

SEQ ID NO: 12540 - DNA, 21 bp, Homo sapiens
agaactttccrtcaaacatct

SEQ ID NO: 12541 - DNA, 21 bp, Homo sapiens
accgctcgccrttgtgcctga

SEQ ID NO: 12542 - DNA, 21 bp, Homo sapiens
tcgttgtgcaraagcttggtg

SEQ ID NO: 12543 - DNA, 21 bp, Homo sapiens
gggacgcttaygttccattct

SEQ ID NO: 12544 - DNA, 21 bp, Homo sapiens
ttccaccctcrgaagcaggcc

SEQ ID NO: 12545 - DNA, 21 bp, Homo sapiens
gcatacctctytgagaaccat

SEQ ID NO: 12546 - DNA, 21 bp, Homo sapiens
ataaatccatsgggaaagtga

SEQ ID NO: 12547 - DNA, 21 bp, Homo sapiens
gtttctgcatstagatttcac

SEQ ID NO: 12548 - DNA, 21 bp, Homo sapiens
atgtgatacarttcatattca

SEQ ID NO: 12549 - DNA, 21 bp, Homo sapiens
ccacagtttgycattgtgtga

SEQ ID NO: 12550 - DNA, 21 bp, Homo sapiens
gatttaatttygttttaaagg

SEQ ID NO: 12551 - DNA, 21 bp, Homo sapiens
aagtactcctrggatttctgc

SEQ ID NO: 12552 - DNA, 21 bp, Homo sapiens
ggcaattgcayaggaggcagc

SEQ ID NO: 12553 - DNA, 21 bp, Homo sapiens
atctagctttrttcagtagat

SEQ ID NO: 12554 - DNA, 21 bp, Homo sapiens
cactgagaaayacaacgatgg

SEQ ID NO: 12555 - DNA, 21 bp, Homo sapiens
agatctaagaragatgatgtt

SEQ ID NO: 12556 - DNA, 21 bp, Homo sapiens
aaacggttaawggagttgctt

SEQ ID NO: 12557 - DNA, 21 bp, Homo sapiens
gagattccagygaaaatcagc

SEQ ID NO: 12558 - DNA, 21 bp, Homo sapiens
gcgttagaacrcagattgccg

SEQ ID NO: 12559 - DNA, 21 bp, Homo sapiens
ttagaattccrtctcgttctg

SEQ ID NO: 12560 - DNA, 21 bp, Homo sapiens
aagttggattrtgtatattat

SEQ ID NO: 12561 - DNA, 21 bp, Homo sapiens
atacagattaygtgcaaaaaa

SEQ ID NO: 12562 - DNA, 21 bp, Homo sapiens
aaatttgcacrtgtgtggttt

SEQ ID NO: 12563 - DNA, 21 bp, Homo sapiens
tatattcatcrataccaattg

SEQ ID NO: 12564 - DNA, 21 bp, Homo sapiens
atgagggaacygaagatagca

SEQ ID NO: 12565 - DNA, 21 bp, Homo sapiens
ggattaaggarcagtgagagc

SEQ ID NO: 12566 - DNA, 21 bp, Homo sapiens
attacttaaasacactgtaat

SEQ ID NO: 12567 - DNA, 21 bp, Homo sapiens
tacaaaaggaytcactaacct

SEQ ID NO: 12568 - DNA, 21 bp, Homo sapiens
aaagggctaayggaagcctgg

SEQ ID NO: 12569 - DNA, 21 bp, Homo sapiens
cagaatcccamtgaaataacc

SEQ ID NO: 12570 - DNA, 21 bp, Homo sapiens
gatagccctcrcttgctaagc

SEQ ID NO: 12571 - DNA, 21 bp, Homo sapiens
gcatgtatcartatatttttg

SEQ ID NO: 12572 - DNA, 21 bp, Homo sapiens
aaggcaaatgrgaatcactgg

SEQ ID NO: 12573 - DNA, 21 bp, Homo sapiens
acatattttcrccaagtgacc

SEQ ID NO: 12574 - DNA, 21 bp, Homo sapiens
ggacttgcacrttacactaga

SEQ ID NO: 12575 - DNA, 21 bp, Homo sapiens
attcttgatgratccaaagtg

SEQ ID NO: 12576 - DNA, 21 bp, Homo sapiens
ttgcatccccyggtacattga

SEQ ID NO: 12577 - DNA, 21 bp, Homo sapiens
cctaattaacrttcttccaag

SEQ ID NO: 12578 - DNA, 21 bp, Homo sapiens
tatgtttcatragccttgtca

SEQ ID NO: 12579 - DNA, 21 bp, Homo sapiens
gacagtgatcrgatgtgcgga

SEQ ID NO: 12580 - DNA, 21 bp, Homo sapiens
ggtgaagccartaaaaagtaa

SEQ ID NO: 12581 - DNA, 21 bp, Homo sapiens
tcaacatcacrtggggtacca

SEQ ID NO: 12582 - DNA, 21 bp, Homo sapiens
aaatgtgacayaatcaattac

SEQ ID NO: 12583 - DNA, 21 bp, Homo sapiens
ttacaactgaygtaagggcct

SEQ ID NO: 12584 - DNA, 21 bp, Homo sapiens
tcaacaagaastagcccataa

SEQ ID NO: 12585 - DNA, 21 bp, Homo sapiens
gtctgagttcmtcctggtaaa

SEQ ID NO: 12586 - DNA, 21 bp, Homo sapiens
gaaaagatgcraactaaattg

SEQ ID NO: 12587 - DNA, 21 bp, Homo sapiens
gcccacctttytctgcaagcc

SEQ ID NO: 12588 - DNA, 21 bp, Homo sapiens
gaagagttacmagtgggatgc

SEQ ID NO: 12589 - DNA, 21 bp, Homo sapiens
aattatacatytatgcatcca

SEQ ID NO: 12590 - DNA, 21 bp, Homo sapiens
ggaattatttstcttataact

SEQ ID NO: 12591 - DNA, 21 bp, Homo sapiens
tgtccttaaastatactgaac

SEQ ID NO: 12592 - DNA, 21 bp, Homo sapiens
actcagcacartcaaatatga

SEQ ID NO: 12593 - DNA, 21 bp, Homo sapiens
ctaatgctacktaggacttct

SEQ ID NO: 12594 - DNA, 21 bp, Homo sapiens
ggcttccctgsggataaaata

SEQ ID NO: 12595 - DNA, 21 bp, Homo sapiens
cgtcacacaaracaagaggca

SEQ ID NO: 12596 - DNA, 21 bp, Homo sapiens
gaagagggaasgttgggtaag

SEQ ID NO: 12597 - DNA, 21 bp, Homo sapiens
gtacaaccacyggggcaggta

SEQ ID NO: 12598 - DNA, 21 bp, Homo sapiens
gtctgactgtraacagaagac

SEQ ID NO: 12599 - DNA, 21 bp, Homo sapiens
agtaagttggytttgaaaaga

SEQ ID NO: 12600 - DNA, 21 bp, Homo sapiens
atgtgaactaytcaggagaaa

SEQ ID NO: 12601 - DNA, 21 bp, Homo sapiens
actttgaatayacgtaaatgt

SEQ ID NO: 12602 - DNA, 21 bp, Homo sapiens
tgcctgagagstgcccagaga

SEQ ID NO: 12603 - DNA, 21 bp, Homo sapiens
acagagtagargcttaggatg

SEQ ID NO: 12604 - DNA, 21 bp, Homo sapiens
tgaataataarcctgtaatag

SEQ ID NO: 12605 - DNA, 21 bp, Homo sapiens
actgataacartagaggtttc

SEQ ID NO: 12606 - DNA, 21 bp, Homo sapiens
tttgttactcmgtctgcatgt

SEQ ID NO: 12607 - DNA, 21 bp, Homo sapiens
tattgtaaagygtttgcaaat

SEQ ID NO: 12608 - DNA, 21 bp, Homo sapiens
atgatacttayacttgaatca

SEQ ID NO: 12609 - DNA, 21 bp, Homo sapiens
tactcaactgytcttaactta

SEQ ID NO: 12610 - DNA, 21 bp, Homo sapiens
attgaggggcrtacagaaata

SEQ ID NO: 12611 - DNA, 21 bp, Homo sapiens
tcaatcatgcytctttgaacc

SEQ ID NO: 12612 - DNA, 21 bp, Homo sapiens
tttacggtatmttttgtttgc

SEQ ID NO: 12613 - DNA, 21 bp, Homo sapiens
tcttgctcacrctgtatttct

SEQ ID NO: 12614 - DNA, 21 bp, Homo sapiens
gtttgctgccrtctgaaatat

SEQ ID NO: 12615 - DNA, 21 bp, Homo sapiens
tagtttctagyctaaggcttt

SEQ ID NO: 12616 - DNA, 21 bp, Homo sapiens
aaggcttactytatgcatacg

SEQ ID NO: 12617 - DNA, 21 bp, Homo sapiens
atactattccyatttttagca

SEQ ID NO: 12618 - DNA, 21 bp, Homo sapiens
agttacaaaawcagttctctc

SEQ ID NO: 12619 - DNA, 21 bp, Homo sapiens
acctagcacaraagatttcat

SEQ ID NO: 12620 - DNA, 21 bp, Homo sapiens
ttgtattgtayatcaaccata

SEQ ID NO: 12621 - DNA, 21 bp, Homo sapiens
gcactgtgctrttctctcatg

SEQ ID NO: 12622 - DNA, 21 bp, Homo sapiens
taggacctggyagggcaacct

SEQ ID NO: 12623 - DNA, 21 bp, Homo sapiens
cagtttgtggyttgtctttta

SEQ ID NO: 12624 - DNA, 21 bp, Homo sapiens
acccctgctcwagcatatctg

SEQ ID NO: 12625 - DNA, 21 bp, Homo sapiens
tgaaaactgamccagtcaatt

SEQ ID NO: 12626 - DNA, 21 bp, Homo sapiens
agaggaatgasagctgatgca

SEQ ID NO: 12627 - DNA, 21 bp, Homo sapiens
taggtaacttyataaactgcc

SEQ ID NO: 12628 - DNA, 21 bp, Homo sapiens
ttttcgtaagyagacagactc

SEQ ID NO: 12629 - DNA, 21 bp, Homo sapiens
ggtttcatatytatttccttc

SEQ ID NO: 12630 - DNA, 21 bp, Homo sapiens
acgggtatctrtacacaaata

SEQ ID NO: 12631 - DNA, 21 bp, Homo sapiens
aaacgttatcracaaattatt

SEQ ID NO: 12632 - DNA, 21 bp, Homo sapiens
aaaatggaaarcagtgtccag

SEQ ID NO: 12633 - DNA, 21 bp, Homo sapiens
agggatgattsagcagggagt

SEQ ID NO: 12634 - DNA, 21 bp, Homo sapiens
ttggaaaaaarttccatttgc

SEQ ID NO: 12635 - DNA, 21 bp, Homo sapiens
attttcagagwttgctcatag

SEQ ID NO: 12636 - DNA, 21 bp, Homo sapiens
acagtccctayggtacaagag

SEQ ID NO: 12637 - DNA, 21 bp, Homo sapiens
agtttcttatrttgtcaatta

SEQ ID NO: 12638 - DNA, 21 bp, Homo sapiens
ttattctgtcytagtatttaa

SEQ ID NO: 12639 - DNA, 21 bp, Homo sapiens
gggaaactggmgtgaggagag

SEQ ID NO: 12640 - DNA, 21 bp, Homo sapiens
tcattgttcaragggtcactt

SEQ ID NO: 12641 - DNA, 21 bp, Homo sapiens
tactttgtggyttttggaaag

SEQ ID NO: 12642 - DNA, 21 bp, Homo sapiens
agtagcacgcrtaccctcaga

SEQ ID NO: 12643 - DNA, 21 bp, Homo sapiens
gctcagaaatkctaaaattcc

SEQ ID NO: 12644 - DNA, 21 bp, Homo sapiens
acagcagtgayatttcaactg

SEQ ID NO: 12645 - DNA, 21 bp, Homo sapiens
gtagagtattsgacatttagt

SEQ ID NO: 12646 - DNA, 21 bp, Homo sapiens
tggtttagcckaagtttacat

SEQ ID NO: 12647 - DNA, 21 bp, Homo sapiens
actgttcttaygtaatgctgg

SEQ ID NO: 12648 - DNA, 21 bp, Homo sapiens
gtcagtcctgwggccatggaa

SEQ ID NO: 12649 - DNA, 21 bp, Homo sapiens
gcagaggagamattggtttaa

SEQ ID NO: 12650 - DNA, 21 bp, Homo sapiens
attttgttcaygtttcatttg

SEQ ID NO: 12651 - DNA, 21 bp, Homo sapiens
cacatacctaytgagctgcaa

SEQ ID NO: 12652 - DNA, 21 bp, Homo sapiens
ttcctcatcawtctgtcaatt

SEQ ID NO: 12653 - DNA, 21 bp, Homo sapiens
gtatttgtagytccctcattc

SEQ ID NO: 12654 - DNA, 21 bp, Homo sapiens
aattctaaaaycaggaaagct

SEQ ID NO: 12655 - DNA, 21 bp, Homo sapiens
tgcttaaaacrcttccatggt

SEQ ID NO: 12656 - DNA, 21 bp, Homo sapiens
gaacccataaytttggaagct

SEQ ID NO: 12657 - DNA, 21 bp, Homo sapiens
cagttaatagsgctttctatt

SEQ ID NO: 12658 - DNA, 21 bp, Homo sapiens
ctgaatttgaytaccactgtt

SEQ ID NO: 12659 - DNA, 21 bp, Homo sapiens
cacagtcccgrgcacacagtg

SEQ ID NO: 12660 - DNA, 21 bp, Homo sapiens
agaaatcttcrtgccaagtta

SEQ ID NO: 12661 - DNA, 21 bp, Homo sapiens
cccttgctctyaggcaaaagt

SEQ ID NO: 12662 - DNA, 21 bp, Homo sapiens
catctctcackacaggacccc

SEQ ID NO: 12663 - DNA, 21 bp, Homo sapiens
aagtcttcagytgggttccat

SEQ ID NO: 12664 - DNA, 21 bp, Homo sapiens
acagtagtacrtgcttcaaga

SEQ ID NO: 12665 - DNA, 21 bp, Homo sapiens
tcaccactggycctgataaca

SEQ ID NO: 12666 - DNA, 21 bp, Homo sapiens
gccctcttgtytctggctttt

SEQ ID NO: 12667 - DNA, 21 bp, Homo sapiens
agataccaatrtctcagtgag

SEQ ID NO: 12668 - DNA, 21 bp, Homo sapiens
ttcctgcttgmccctgctcag

SEQ ID NO: 12669 - DNA, 21 bp, Homo sapiens
tggtgaggcargctttcaagt

SEQ ID NO: 12670 - DNA, 21 bp, Homo sapiens
ttcccttgggktttctctccc

SEQ ID NO: 12671 - DNA, 21 bp, Homo sapiens
cctcatgaccmcttattagta

SEQ ID NO: 12672 - DNA, 21 bp, Homo sapiens
aaatgttcctrgaggtcttct

SEQ ID NO: 12673 - DNA, 21 bp, Homo sapiens
tttctcaacayggtttttaca

SEQ ID NO: 12674 - DNA, 21 bp, Homo sapiens
ccttcttaccrgaaccttgtg

SEQ ID NO: 12675 - DNA, 21 bp, Homo sapiens
cttgtttagtycttcattcag

SEQ ID NO: 12676 - DNA, 21 bp, Homo sapiens
ggcctgggccrctggatagct

SEQ ID NO: 12677 - DNA, 21 bp, Homo sapiens
gctctgtgaarcatgttcaca

SEQ ID NO: 12678 - DNA, 21 bp, Homo sapiens
tgagtagaacygggccagttg

SEQ ID NO: 12679 - DNA, 21 bp, Homo sapiens
gctcagtgacrtcaacaggat

SEQ ID NO: 12680 - DNA, 21 bp, Homo sapiens
ctggaaggtcrggaaatccag

SEQ ID NO: 12681 - DNA, 21 bp, Homo sapiens
tatctcatggkgaaaagtgaa

SEQ ID NO: 12682 - DNA, 21 bp, Homo sapiens
tagggaacttrgggcccagtc

SEQ ID NO: 12683 - DNA, 21 bp, Homo sapiens
tgaaattggcygaaaagacat

SEQ ID NO: 12684 - DNA, 21 bp, Homo sapiens
actgggcatcyggagagaggg

SEQ ID NO: 12685 - DNA, 21 bp, Homo sapiens
aatcattctcstttacagaac

SEQ ID NO: 12686 - DNA, 21 bp, Homo sapiens
agtatagaaaycagaatatat

SEQ ID NO: 12687 - DNA, 21 bp, Homo sapiens
tgattttcctyaacctccttc

SEQ ID NO: 12688 - DNA, 21 bp, Homo sapiens
cctgccacctygctcttgttt

SEQ ID NO: 12689 - DNA, 21 bp, Homo sapiens
ttttgttgacytaattacctc

SEQ ID NO: 12690 - DNA, 21 bp, Homo sapiens
tgtcactcatrgatgaatcac

SEQ ID NO: 12691 - DNA, 21 bp, Homo sapiens
tttattcacaycttgacaaat

SEQ ID NO: 12692 - DNA, 21 bp, Homo sapiens
ccaaaccaccrgtccagaaat

SEQ ID NO: 12693 - DNA, 21 bp, Homo sapiens
cccatgagttrtaaatttttt

SEQ ID NO: 12694 - DNA, 21 bp, Homo sapiens
atgctaaggartcatttccta

SEQ ID NO: 12695 - DNA, 21 bp, Homo sapiens
tgggatgattrtctacacctg

SEQ ID NO: 12696 - DNA, 21 bp, Homo sapiens
atgtttactcrcggagaactg

SEQ ID NO: 12697 - DNA, 21 bp, Homo sapiens
gtgagagttayttatttctat

SEQ ID NO: 12698 - DNA, 21 bp, Homo sapiens
ttataaaaaastccttgttgc

SEQ ID NO: 12699 - DNA, 21 bp, Homo sapiens
ggatttgagasgccaagatct

SEQ ID NO: 12700 - DNA, 21 bp, Homo sapiens
tttgaatgctrgtttcatatt

SEQ ID NO: 12701 - DNA, 21 bp, Homo sapiens
atctttggacrttttaccccc

SEQ ID NO: 12702 - DNA, 21 bp, Homo sapiens
acaaacatggmacattgattg

SEQ ID NO: 12703 - DNA, 21 bp, Homo sapiens
attactgctawtaagaatggc

SEQ ID NO: 12704 - DNA, 21 bp, Homo sapiens
cttctgttctrtatctacatg

SEQ ID NO: 12705 - DNA, 21 bp, Homo sapiens
aaccagtttcrtgtttcatat

SEQ ID NO: 12706 - DNA, 21 bp, Homo sapiens
gagtcattttygcttatctca

SEQ ID NO: 12707 - DNA, 21 bp, Homo sapiens
tagagtagaaycatgctgtaa

SEQ ID NO: 12708 - DNA, 21 bp, Homo sapiens
ttatggaatgmgaagttttat

SEQ ID NO: 12709 - DNA, 21 bp, Homo sapiens
gcccataaggsatattttgca

SEQ ID NO: 12710 - DNA, 21 bp, Homo sapiens
tttcatgtcartgggtatgaa

SEQ ID NO: 12711 - DNA, 21 bp, Homo sapiens
tactgttagcscctttggcaa

SEQ ID NO: 12712 - DNA, 21 bp, Homo sapiens
agtgaggtgcrtgtgataatg

SEQ ID NO: 12713 - DNA, 21 bp, Homo sapiens
ccaaatgtgaygttattacag

SEQ ID NO: 12714 - DNA, 21 bp, Homo sapiens
agttgatgaaraggcattgga

SEQ ID NO: 12715 - DNA, 21 bp, Homo sapiens
acagctccctygtaattttta

SEQ ID NO: 12716 - DNA, 21 bp, Homo sapiens
gtgctgatgayggccatgatg

SEQ ID NO: 12717 - DNA, 21 bp, Homo sapiens
agcttccaggrcctctttctc

SEQ ID NO: 12718 - DNA, 21 bp, Homo sapiens
catctacttgyatgtccttca

SEQ ID NO: 12719 - DNA, 21 bp, Homo sapiens
tagcaataccrcatttatttt

SEQ ID NO: 12720 - DNA, 21 bp, Homo sapiens
tgatgccatakttaaatatga

SEQ ID NO: 12721 - DNA, 21 bp, Homo sapiens
caacctgaacwaagaacaaaa

SEQ ID NO: 12722 - DNA, 21 bp, Homo sapiens
cgttttgccayatcagcaacc

SEQ ID NO: 12723 - DNA, 21 bp, Homo sapiens
aatagagtttsccagaattaa

SEQ ID NO: 12724 - DNA, 21 bp, Homo sapiens
caaagtctggsaaagttgcct

SEQ ID NO: 12725 - DNA, 21 bp, Homo sapiens
cattggagaarcatgaaggca

SEQ ID NO: 12726 - DNA, 21 bp, Homo sapiens
cttcactgttratactgaaaa

SEQ ID NO: 12727 - DNA, 21 bp, Homo sapiens
gacatatggcraagattatat

SEQ ID NO: 12728 - DNA, 21 bp, Homo sapiens
tactggccaamtgaaaattaa

SEQ ID NO: 12729 - DNA, 21 bp, Homo sapiens
ggggtcagagyggtggttgtt

SEQ ID NO: 12730 - DNA, 21 bp, Homo sapiens
aacagacacgrgtatttaatt

SEQ ID NO: 12731 - DNA, 21 bp, Homo sapiens
cagatagattyggtggaagct

SEQ ID NO: 12732 - DNA, 21 bp, Homo sapiens
tcacccaaaakagtaaatatt

SEQ ID NO: 12733 - DNA, 21 bp, Homo sapiens
tatttcccttyccgtggccca

SEQ ID NO: 12734 - DNA, 21 bp, Homo sapiens
atctctctttyaaaacataac

SEQ ID NO: 12735 - DNA, 21 bp, Homo sapiens
tgagcccttcraaacatcagc

SEQ ID NO: 12736 - DNA, 21 bp, Homo sapiens
ttggtgattcyctccacctct

SEQ ID NO: 12737 - DNA, 21 bp, Homo sapiens
tagtgattacmatcttggatg

SEQ ID NO: 12738 - DNA, 21 bp, Homo sapiens
acaggtttttyctgggagcct

SEQ ID NO: 12739 - DNA, 21 bp, Homo sapiens
ttctttttttyggttatctgt

SEQ ID NO: 12740 - DNA, 21 bp, Homo sapiens
agcaccagccraaatgtttga

SEQ ID NO: 12741 - DNA, 21 bp, Homo sapiens
ttcttattccraaattacact

SEQ ID NO: 12742 - DNA, 21 bp, Homo sapiens
ggatgatgggrccataaaagt

SEQ ID NO: 12743 - DNA, 21 bp, Homo sapiens
tagtttccacrtcatttttgt

SEQ ID NO: 12744 - DNA, 21 bp, Homo sapiens
ggattgcacayatcatttgga

SEQ ID NO: 12745 - DNA, 21 bp, Homo sapiens
caagggcggtrccaagacttc

SEQ ID NO: 12746 - DNA, 21 bp, Homo sapiens
agggcatgctyagatcaccct

SEQ ID NO: 12747 - DNA, 21 bp, Homo sapiens
tacccacgatycttcaaagtg

SEQ ID NO: 12748 - DNA, 21 bp, Homo sapiens
taggtgattcycctaaacatc

SEQ ID NO: 12749 - DNA, 21 bp, Homo sapiens
gccacgcttcsaaaggaaaaa

SEQ ID NO: 12750 - DNA, 21 bp, Homo sapiens
tgcacttgtgrcctctccttc

SEQ ID NO: 12751 - DNA, 21 bp, Homo sapiens
gggaatcaggrccttgagttc

SEQ ID NO: 12752 - DNA, 21 bp, Homo sapiens
tcctgagtaamtccacacaca

SEQ ID NO: 12753 - DNA, 21 bp, Homo sapiens
tgaaaacatamattgtggccc

SEQ ID NO: 12754 - DNA, 21 bp, Homo sapiens
gtgaaacacaktccttctgta

SEQ ID NO: 12755 - DNA, 21 bp, Homo sapiens
ttgaatttagygatgttaagg

SEQ ID NO: 12756 - DNA, 21 bp, Homo sapiens
ctgctatgctstgtgttcaag

SEQ ID NO: 12757 - DNA, 21 bp, Homo sapiens
gtctgcaacgytgaatttgga

SEQ ID NO: 12758 - DNA, 21 bp, Homo sapiens
tgggtgttttstcattctttg

SEQ ID NO: 12759 - DNA, 21 bp, Homo sapiens
ctccttgttcyatagtatatt

SEQ ID NO: 12760 - DNA, 21 bp, Homo sapiens
tctctgaattrtgggtttagg

SEQ ID NO: 12761 - DNA, 21 bp, Homo sapiens
tctggggcttkggaaagtcac

SEQ ID NO: 12762 - DNA, 21 bp, Homo sapiens
ccttcaaaaayggatagattt

SEQ ID NO: 12763 - DNA, 21 bp, Homo sapiens
tgctgatattkcgtgtctctt

SEQ ID NO: 12764 - DNA, 21 bp, Homo sapiens
tgaggttgagraagtattgcc

SEQ ID NO: 12765 - DNA, 21 bp, Homo sapiens
ctttaattatmcctgattggg

SEQ ID NO: 12766 - DNA, 21 bp, Homo sapiens
tttaaagattkagtaacttat

SEQ ID NO: 12767 - DNA, 21 bp, Homo sapiens
tcagaccctgrtaggcataag

SEQ ID NO: 12768 - DNA, 21 bp, Homo sapiens
gcaaaggctgktctgattaca

SEQ ID NO: 12769 - DNA, 21 bp, Homo sapiens
aagtttccatygaagataaag

SEQ ID NO: 12770 - DNA, 21 bp, Homo sapiens
aatagtagcamtgtatgcctt

SEQ ID NO: 12771 - DNA, 21 bp, Homo sapiens
taataatttcrgtctttaaat

SEQ ID NO: 12772 - DNA, 21 bp, Homo sapiens
tgggtttgccyacaacttcag

SEQ ID NO: 12773 - DNA, 21 bp, Homo sapiens
gccttcacagwcaacatttga

SEQ ID NO: 12774 - DNA, 21 bp, Homo sapiens
aggtgagagasagcatctcag

SEQ ID NO: 12775 - DNA, 21 bp, Homo sapiens
ttaatgcattyagcttgaata

SEQ ID NO: 12776 - DNA, 21 bp, Homo sapiens
aatgtatcatyttatggtgtg

SEQ ID NO: 12777 - DNA, 21 bp, Homo sapiens
tcaacaaatcytcttattgtc

SEQ ID NO: 12778 - DNA, 21 bp, Homo sapiens
gatttcttcayagcaatgttc

SEQ ID NO: 12779 - DNA, 21 bp, Homo sapiens
gagaaagccckccttagaaaa

SEQ ID NO: 12780 - DNA, 21 bp, Homo sapiens
ccgagcaagargcaactgtat

SEQ ID NO: 12781 - DNA, 21 bp, Homo sapiens
aaacagtcctyggtgtccgct

SEQ ID NO: 12782 - DNA, 21 bp, Homo sapiens
ttttttttttsagaactccaa

SEQ ID NO: 12783 - DNA, 21 bp, Homo sapiens
gacaaaaaagkaagggattgc

SEQ ID NO: 12784 - DNA, 21 bp, Homo sapiens
tcatttcctgragagttacgg

SEQ ID NO: 12785 - DNA, 21 bp, Homo sapiens
taagaatgctwattgctgcta

SEQ ID NO: 12786 - DNA, 21 bp, Homo sapiens
agtcaataacraaatccacat

SEQ ID NO: 12787 - DNA, 21 bp, Homo sapiens
tttcgtgtgtkttccctttgt

SEQ ID NO: 12788 - DNA, 21 bp, Homo sapiens
aaacaaagaarcccaatgtaa

SEQ ID NO: 12789 - DNA, 21 bp, Homo sapiens
cagggatgctyagggcaggtg

SEQ ID NO: 12790 - DNA, 21 bp, Homo sapiens
ttggtggcacygatgttagga

SEQ ID NO: 12791 - DNA, 21 bp, Homo sapiens
gtgtctagagygggctggacg

SEQ ID NO: 12792 - DNA, 21 bp, Homo sapiens
aggatagaaayctgaacgcat

SEQ ID NO: 12793 - DNA, 21 bp, Homo sapiens
ccttaactccytaactctccc

SEQ ID NO: 12794 - DNA, 21 bp, Homo sapiens
agccacagcgmattaatgctt

SEQ ID NO: 12795 - DNA, 21 bp, Homo sapiens
tcctgggccaygggtgtctgt

SEQ ID NO: 12796 - DNA, 21 bp, Homo sapiens
tccagaccctrgtccaagcag

SEQ ID NO: 12797 - DNA, 21 bp, Homo sapiens
aggtcagtgakcagggtttcc

SEQ ID NO: 12798 - DNA, 21 bp, Homo sapiens
gattattgatrtcattaggct

SEQ ID NO: 12799 - DNA, 21 bp, Homo sapiens
ggggatgcacrggtcaggagg

SEQ ID NO: 12800 - DNA, 21 bp, Homo sapiens
cccaggcctcyagttcttgtt

SEQ ID NO: 12801 - DNA, 21 bp, Homo sapiens
ctgtgttgacmactccaggcc

SEQ ID NO: 12802 - DNA, 21 bp, Homo sapiens
cagtggcatasagaacccaca

SEQ ID NO: 12803 - DNA, 21 bp, Homo sapiens
tttatacatakgaccatcatt

SEQ ID NO: 12804 - DNA, 21 bp, Homo sapiens
cagaagatgckaagtgttttg

SEQ ID NO: 12805 - DNA, 21 bp, Homo sapiens
agtgtttagcytattttttaa

SEQ ID NO: 12806 - DNA, 21 bp, Homo sapiens
aaaatctacaytataaccctt

SEQ ID NO: 12807 - DNA, 21 bp, Homo sapiens
aggggcatacwtgctttccag

SEQ ID NO: 12808 - DNA, 21 bp, Homo sapiens
gccacttgaargatctactaa

SEQ ID NO: 12809 - DNA, 21 bp, Homo sapiens
cctgtattatrtggaccaaac

SEQ ID NO: 12810 - DNA, 21 bp, Homo sapiens
tcacctgtctyagaacttgct

SEQ ID NO: 12811 - DNA, 21 bp, Homo sapiens
aagaaagatgscaaatgtaca

SEQ ID NO: 12812 - DNA, 21 bp, Homo sapiens
aaaccagtgaygtgggaggga

SEQ ID NO: 12813 - DNA, 21 bp, Homo sapiens
atgcattgagrtaagtatcca

SEQ ID NO: 12814 - DNA, 21 bp, Homo sapiens
tgaaatacctstttacgtgct

SEQ ID NO: 12815 - DNA, 21 bp, Homo sapiens
taatatagatytcatttgtgt

SEQ ID NO: 12816 - DNA, 21 bp, Homo sapiens
agttgtaggawgttgctgtat

SEQ ID NO: 12817 - DNA, 21 bp, Homo sapiens
cgctaccccasagaccctctg

SEQ ID NO: 12818 - DNA, 21 bp, Homo sapiens
gacttttctcrtagcaaaaga

SEQ ID NO: 12819 - DNA, 21 bp, Homo sapiens
catacttcacrgagcttagac

SEQ ID NO: 12820 - DNA, 21 bp, Homo sapiens
ttggccctttyagcttcagat

SEQ ID NO: 12821 - DNA, 21 bp, Homo sapiens
taattctctgrgtgaaggatt

SEQ ID NO: 12822 - DNA, 21 bp, Homo sapiens
tatgtccaacrcaccttcaac

SEQ ID NO: 12823 - DNA, 21 bp, Homo sapiens
tgtgttgaatkaatgcatggg

SEQ ID NO: 12824 - DNA, 21 bp, Homo sapiens
gccttccagayccaccacagc

SEQ ID NO: 12825 - DNA, 21 bp, Homo sapiens
cataggccacygtgtgtttat

SEQ ID NO: 12826 - DNA, 21 bp, Homo sapiens
ttcagtgtagycataatttgt

SEQ ID NO: 12827 - DNA, 21 bp, Homo sapiens
tgtggacacartaggaaagaa

SEQ ID NO: 12828 - DNA, 21 bp, Homo sapiens
tagtatcttaytgaaattcca

SEQ ID NO: 12829 - DNA, 21 bp, Homo sapiens
ggtattatacyattttcagaa

SEQ ID NO: 12830 - DNA, 21 bp, Homo sapiens
gtgaacattcrtgaagtatag

SEQ ID NO: 12831 - DNA, 21 bp, Homo sapiens
caatgtcattrtgtagtacat

SEQ ID NO: 12832 - DNA, 21 bp, Homo sapiens
agaaaaaaaarttgtgaggca

SEQ ID NO: 12833 - DNA, 21 bp, Homo sapiens
tgaatttagtrctttggatct

SEQ ID NO: 12834 - DNA, 21 bp, Homo sapiens
gacaaagaacrttaagtctat

SEQ ID NO: 12835 - DNA, 21 bp, Homo sapiens
ttgcattgctrtaggactaac

SEQ ID NO: 12836 - DNA, 21 bp, Homo sapiens
aatggcaaaaygaggacagaa

SEQ ID NO: 12837 - DNA, 21 bp, Homo sapiens
tttcctagtgstgaggaacag

SEQ ID NO: 12838 - DNA, 21 bp, Homo sapiens
ccattttgtcyctgtgtcttg

SEQ ID NO: 12839 - DNA, 21 bp, Homo sapiens
atgaagaaagrgtgttatggg

SEQ ID NO: 12840 - DNA, 21 bp, Homo sapiens
aaattcatcartacatttgca

SEQ ID NO: 12841 - DNA, 21 bp, Homo sapiens
taggtctaggwctgtttctct

SEQ ID NO: 12842 - DNA, 21 bp, Homo sapiens
cagtgcctgastcaacatgaa

SEQ ID NO: 12843 - DNA, 21 bp, Homo sapiens
ctacaggtcamctgaatcacc

SEQ ID NO: 12844 - DNA, 21 bp, Homo sapiens
aattacatacrctaattacca

SEQ ID NO: 12845 - DNA, 21 bp, Homo sapiens
cactcagtttycaaatgtaag

SEQ ID NO: 12846 - DNA, 21 bp, Homo sapiens
gatctttccayttaaaggtag

SEQ ID NO: 12847 - DNA, 21 bp, Homo sapiens
ctcttctatcygtacctgcct

SEQ ID NO: 12848 - DNA, 21 bp, Homo sapiens
cacagagaggyagggaacatt

SEQ ID NO: 12849 - DNA, 21 bp, Homo sapiens
ttctagtgccmatggacatcc

SEQ ID NO: 12850 - DNA, 21 bp, Homo sapiens
taagtaaaatragaaatcagt

SEQ ID NO: 12851 - DNA, 21 bp, Homo sapiens
caacacctccktaagtttgac

SEQ ID NO: 12852 - DNA, 21 bp, Homo sapiens
ttagcttcagygtaccccttt

SEQ ID NO: 12853 - DNA, 21 bp, Homo sapiens
tgtagcgtgcrtttgagtagc

SEQ ID NO: 12854 - DNA, 21 bp, Homo sapiens
gataccagatrttaaggcatt

SEQ ID NO: 12855 - DNA, 21 bp, Homo sapiens
gaatcgggagmagcgggcact

SEQ ID NO: 12856 - DNA, 21 bp, Homo sapiens
ggtgataggaytaactccctt

SEQ ID NO: 12857 - DNA, 21 bp, Homo sapiens
tttcacccgtrtattatagag

SEQ ID NO: 12858 - DNA, 21 bp, Homo sapiens
ctgtaggcttsagaaaaggca

SEQ ID NO: 12859 - DNA, 21 bp, Homo sapiens
tcgttaaaaawtaggtatgta

SEQ ID NO: 12860 - DNA, 21 bp, Homo sapiens
taccatgtttygtgcagtgtt

SEQ ID NO: 12861 - DNA, 21 bp, Homo sapiens
gaaggacgggkttagtagtaa

SEQ ID NO: 12862 - DNA, 21 bp, Homo sapiens
aatgtctggaragtgactgcc

SEQ ID NO: 12863 - DNA, 21 bp, Homo sapiens
ggatgattgtrgtattaactg

SEQ ID NO: 12864 - DNA, 21 bp, Homo sapiens
cttccatagcmccgtataagc

SEQ ID NO: 12865 - DNA, 21 bp, Homo sapiens
gttactctccygataatgagt

SEQ ID NO: 12866 - DNA, 21 bp, Homo sapiens
aacacacaagsgttcacggaa

SEQ ID NO: 12867 - DNA, 21 bp, Homo sapiens
aagcattatastaggaagaag

SEQ ID NO: 12868 - DNA, 21 bp, Homo sapiens
gtttcttcttycatgacccac

SEQ ID NO: 12869 - DNA, 21 bp, Homo sapiens
accaaaaaaayagatatccct

SEQ ID NO: 12870 - DNA, 21 bp, Homo sapiens
ctaatgccagytttttagtaa

SEQ ID NO: 12871 - DNA, 21 bp, Homo sapiens
aaaggactcamaaatttcaga

SEQ ID NO: 12872 - DNA, 21 bp, Homo sapiens
ttgagcaagayggaggcaaag

SEQ ID NO: 12873 - DNA, 21 bp, Homo sapiens
ctgacatcacrttaataatga

SEQ ID NO: 12874 - DNA, 21 bp, Homo sapiens
cagtgtcacarattccaaaaa

SEQ ID NO: 12875 - DNA, 21 bp, Homo sapiens
tatgaatacgrtcatctcctg

SEQ ID NO: 12876 - DNA, 21 bp, Homo sapiens
tcagtaatgcygcaagagaca

SEQ ID NO: 12877 - DNA, 21 bp, Homo sapiens
tcaactgtacstatgacttgt

SEQ ID NO: 12878 - DNA, 21 bp, Homo sapiens
gaagtggttamtttaacttga

SEQ ID NO: 12879 - DNA, 21 bp, Homo sapiens
ggccagggggyagtcggactt

SEQ ID NO: 12880 - DNA, 21 bp, Homo sapiens
tccaaagcatrgtccttattc

SEQ ID NO: 12881 - DNA, 21 bp, Homo sapiens
tattagtgccraatttttcct

SEQ ID NO: 12882 - DNA, 21 bp, Homo sapiens
ttaagggctcyttctgtagag

SEQ ID NO: 12883 - DNA, 21 bp, Homo sapiens
gatgaggatgyagattcgaat

SEQ ID NO: 12884 - DNA, 21 bp, Homo sapiens
tattatctaaraatgtgttag

SEQ ID NO: 12885 - DNA, 21 bp, Homo sapiens
cctactatctracaaattgct

SEQ ID NO: 12886 - DNA, 21 bp, Homo sapiens
tagcaagcatygtttagcaga

SEQ ID NO: 12887 - DNA, 21 bp, Homo sapiens
ctatgagcccrcggtcatttt

SEQ ID NO: 12888 - DNA, 21 bp, Homo sapiens
ataagaaaaargctggaaatg

SEQ ID NO: 12889 - DNA, 21 bp, Homo sapiens
aatggcctatkattatcatct

SEQ ID NO: 12890 - DNA, 21 bp, Homo sapiens
tacattttctyatagattctc

SEQ ID NO: 12891 - DNA, 21 bp, Homo sapiens
agtgaaaaacraagtcctgaa

SEQ ID NO: 12892 - DNA, 21 bp, Homo sapiens
gtgtaagtcckattggctgac

SEQ ID NO: 12893 - DNA, 21 bp, Homo sapiens
tgagtggttakctgttcttta

SEQ ID NO: 12894 - DNA, 21 bp, Homo sapiens
gagtcactaargcaggtttta

SEQ ID NO: 12895 - DNA, 21 bp, Homo sapiens
tcctggtggcrtcaggccttg

SEQ ID NO: 12896 - DNA, 21 bp, Homo sapiens
acctttccctwatctcttaag

SEQ ID NO: 12897 - DNA, 21 bp, Homo sapiens
aggtgaatcasatgagaccaa

SEQ ID NO: 12898 - DNA, 21 bp, Homo sapiens
ttactgaccarttcaagccca

SEQ ID NO: 12899 - DNA, 21 bp, Homo sapiens
caatccattcktgttgtcatt

SEQ ID NO: 12900 - DNA, 21 bp, Homo sapiens
ctttgagcctygttagtgagc

SEQ ID NO: 12901 - DNA, 21 bp, Homo sapiens
ctagtttatgytcctaaaata

SEQ ID NO: 12902 - DNA, 21 bp, Homo sapiens
atgtagtcaaygatacctatt

SEQ ID NO: 12903 - DNA, 21 bp, Homo sapiens
taagggaccartagaagcgtg

SEQ ID NO: 12904 - DNA, 21 bp, Homo sapiens
tatatgtgctrgaatggttga

SEQ ID NO: 12905 - DNA, 21 bp, Homo sapiens
gcatgaaatgrcatagcagtc

SEQ ID NO: 12906 - DNA, 21 bp, Homo sapiens
atatttgtctrtctttccaat

SEQ ID NO: 12907 - DNA, 21 bp, Homo sapiens
agcccaatgtrgctcagataa

SEQ ID NO: 12908 - DNA, 21 bp, Homo sapiens
gagaacagatrtgtgcagaga

SEQ ID NO: 12909 - DNA, 21 bp, Homo sapiens
ttactgaactrtgtacaacat

SEQ ID NO: 12910 - DNA, 21 bp, Homo sapiens
ttaacacttgmaaaaagctat

SEQ ID NO: 12911 - DNA, 21 bp, Homo sapiens
ctttccaaatrtaaagtgctg

SEQ ID NO: 12912 - DNA, 21 bp, Homo sapiens
gcgcaggtacygcttgggcca

SEQ ID NO: 12913 - DNA, 21 bp, Homo sapiens
tcctctcactstggaccaggg

SEQ ID NO: 12914 - DNA, 21 bp, Homo sapiens
tttctattggyttttttaatg

SEQ ID NO: 12915 - DNA, 21 bp, Homo sapiens
taaaggtctawactctctagg

SEQ ID NO: 12916 - DNA, 21 bp, Homo sapiens
catagttaaaktcaatagcca

SEQ ID NO: 12917 - DNA, 21 bp, Homo sapiens
tggcttccctyggttgatctt

SEQ ID NO: 12918 - DNA, 21 bp, Homo sapiens
gtaattgtttyttcatcttct

SEQ ID NO: 12919 - DNA, 21 bp, Homo sapiens
atctgtaaatragaaagcaat

SEQ ID NO: 12920 - DNA, 21 bp, Homo sapiens
tgactgacagsacttagtgat

SEQ ID NO: 12921 - DNA, 21 bp, Homo sapiens
catttgtaacrttcttgccaa

SEQ ID NO: 12922 - DNA, 21 bp, Homo sapiens
gaacttttatrgattcccatt

SEQ ID NO: 12923 - DNA, 21 bp, Homo sapiens
tgtagggttcrtattaattga

SEQ ID NO: 12924 - DNA, 21 bp, Homo sapiens
ttaatcatagytatgctccaa

SEQ ID NO: 12925 - DNA, 21 bp, Homo sapiens
ttcacagttgyatgtcggcag

SEQ ID NO: 12926 - DNA, 21 bp, Homo sapiens
gatcagtgatrtcttggaaat

SEQ ID NO: 12927 - DNA, 21 bp, Homo sapiens
accacttgtcrtattaaatat

SEQ ID NO: 12928 - DNA, 21 bp, Homo sapiens
cttggttgccrgagcaaatta

SEQ ID NO: 12929 - DNA, 21 bp, Homo sapiens
accatttatcraagacttacc

SEQ ID NO: 12930 - DNA, 21 bp, Homo sapiens
atctttatccstagttctgtt

SEQ ID NO: 12931 - DNA, 21 bp, Homo sapiens
tttccaccagscttacccatc

SEQ ID NO: 12932 - DNA, 21 bp, Homo sapiens
ggtgcctcctktgccaagaac

SEQ ID NO: 12933 - DNA, 21 bp, Homo sapiens
gtttgtaagcygtaacataga

SEQ ID NO: 12934 - DNA, 21 bp, Homo sapiens
gaattgtttasaagtaagacg

SEQ ID NO: 12935 - DNA, 21 bp, Homo sapiens
tgtgataactmagaaacactg

SEQ ID NO: 12936 - DNA, 21 bp, Homo sapiens
ctttctttcayaggattccct

SEQ ID NO: 12937 - DNA, 21 bp, Homo sapiens
attccatcagwgacagcagta

SEQ ID NO: 12938 - DNA, 21 bp, Homo sapiens
cctgatggtgwcacttttggt

SEQ ID NO: 12939 - DNA, 21 bp, Homo sapiens
tagttatgcarccatcactac

SEQ ID NO: 12940 - DNA, 21 bp, Homo sapiens
atgggatggtstagatcatgc

SEQ ID NO: 12941 - DNA, 21 bp, Homo sapiens
gagaaaattgraaaaagtagg

SEQ ID NO: 12942 - DNA, 21 bp, Homo sapiens
gttagtctaayttatgaggat

SEQ ID NO: 12943 - DNA, 21 bp, Homo sapiens
ttgtctctttwtcatgtaata

SEQ ID NO: 12944 - DNA, 21 bp, Homo sapiens
ttaattttgcytattgcttta

SEQ ID NO: 12945 - DNA, 21 bp, Homo sapiens
ctaagatgtcygcaaccattt

SEQ ID NO: 12946 - DNA, 21 bp, Homo sapiens
taaaacaaggktacctgtgta

SEQ ID NO: 12947 - DNA, 21 bp, Homo sapiens
taattatactwctctttcagt

SEQ ID NO: 12948 - DNA, 21 bp, Homo sapiens
aggaagtatgraaacaatgaa

SEQ ID NO: 12949 - DNA, 21 bp, Homo sapiens
gagagaaatcyttcaaccagg

SEQ ID NO: 12950 - DNA, 21 bp, Homo sapiens
ggttttctttktctctcagtg

SEQ ID NO: 12951 - DNA, 21 bp, Homo sapiens
aactaccgtgktttccccagg

SEQ ID NO: 12952 - DNA, 21 bp, Homo sapiens
tagttggatasagatggatgt

SEQ ID NO: 12953 - DNA, 21 bp, Homo sapiens
taacctccagkaaacaatatt

SEQ ID NO: 12954 - DNA, 21 bp, Homo sapiens
ttatctgcagkagagaaacgt

SEQ ID NO: 12955 - DNA, 21 bp, Homo sapiens
acctgactggsaaggttctgc

SEQ ID NO: 12956 - DNA, 21 bp, Homo sapiens
tgagagtgttrtataaagagg

SEQ ID NO: 12957 - DNA, 21 bp, Homo sapiens
actcgtaatgyagtcctcaac

SEQ ID NO: 12958 - DNA, 21 bp, Homo sapiens
cacactttctrtatggttagg

SEQ ID NO: 12959 - DNA, 21 bp, Homo sapiens
aatgggaagaragctaatata

SEQ ID NO: 12960 - DNA, 21 bp, Homo sapiens
cttgagtgttyggtgtagctg

SEQ ID NO: 12961 - DNA, 21 bp, Homo sapiens
gaatgtagacrccatgcatcc

SEQ ID NO: 12962 - DNA, 21 bp, Homo sapiens
cagagtcatarttataaacag

SEQ ID NO: 12963 - DNA, 21 bp, Homo sapiens
ccaattccacwcttacaattt

SEQ ID NO: 12964 - DNA, 21 bp, Homo sapiens
attagaaagayatatatgtgt

SEQ ID NO: 12965 - DNA, 21 bp, Homo sapiens
tttagaaagamaaaaactatc

SEQ ID NO: 12966 - DNA, 21 bp, Homo sapiens
ccactgacttrtcatcattcc

SEQ ID NO: 12967 - DNA, 21 bp, Homo sapiens
agcatagaaaygacattttta

SEQ ID NO: 12968 - DNA, 21 bp, Homo sapiens
tctggaaacarctgcttctta

SEQ ID NO: 12969 - DNA, 21 bp, Homo sapiens
ttgttcttaaytgatattcta

SEQ ID NO: 12970 - DNA, 21 bp, Homo sapiens
atgtagtttaygctgtatact

SEQ ID NO: 12971 - DNA, 21 bp, Homo sapiens
ggctaaatagrtactaataat

SEQ ID NO: 12972 - DNA, 21 bp, Homo sapiens
gctgtaaattygaatcagcac

SEQ ID NO: 12973 - DNA, 21 bp, Homo sapiens
tgtgctggagrggaaaaatct

SEQ ID NO: 12974 - DNA, 21 bp, Homo sapiens
catggagattraattctagtg

SEQ ID NO: 12975 - DNA, 21 bp, Homo sapiens
cacatccaggstctatctcac

SEQ ID NO: 12976 - DNA, 21 bp, Homo sapiens
ctccaagccaygctgcccagg

SEQ ID NO: 12977 - DNA, 21 bp, Homo sapiens
tttaatacaaygctgcaaaat

SEQ ID NO: 12978 - DNA, 21 bp, Homo sapiens
ttaaatttctytccagttgca

SEQ ID NO: 12979 - DNA, 21 bp, Homo sapiens
tagatggctaygcaggacagg

SEQ ID NO: 12980 - DNA, 21 bp, Homo sapiens
ctgaccaatcrctgttgaagg

SEQ ID NO: 12981 - DNA, 21 bp, Homo sapiens
ctgctgtccayatctccaact

SEQ ID NO: 12982 - DNA, 21 bp, Homo sapiens
accaatttgakaaatgtaatg

SEQ ID NO: 12983 - DNA, 21 bp, Homo sapiens
tgctaactacytcatccttgt

SEQ ID NO: 12984 - DNA, 21 bp, Homo sapiens
taaatcccagragaagagctg

SEQ ID NO: 12985 - DNA, 21 bp, Homo sapiens
ggttaaacaasaggacttgtg

SEQ ID NO: 12986 - DNA, 21 bp, Homo sapiens
aagtcttgggmagataactca

SEQ ID NO: 12987 - DNA, 21 bp, Homo sapiens
taaatagttcrttgctcaact

SEQ ID NO: 12988 - DNA, 21 bp, Homo sapiens
ttggtttgtcsgatgttgaaa

SEQ ID NO: 12989 - DNA, 21 bp, Homo sapiens
catgcagagarctatcagtga

SEQ ID NO: 12990 - DNA, 21 bp, Homo sapiens
gagagttaccrattcatttca

SEQ ID NO: 12991 - DNA, 21 bp, Homo sapiens
gacccttcttracgatattct

SEQ ID NO: 12992 - DNA, 21 bp, Homo sapiens
tgtaaaatatracatagatgt

SEQ ID NO: 12993 - DNA, 21 bp, Homo sapiens
agcgtttcagmgagaacctca

SEQ ID NO: 12994 - DNA, 21 bp, Homo sapiens
taagctgagaygaggtggaga

SEQ ID NO: 12995 - DNA, 21 bp, Homo sapiens
ggttagaaacrgcagaatgta

SEQ ID NO: 12996 - DNA, 21 bp, Homo sapiens
ctttggctttstcggcttgct

SEQ ID NO: 12997 - DNA, 21 bp, Homo sapiens
ggtccgcttgscggtctgttc

SEQ ID NO: 12998 - DNA, 21 bp, Homo sapiens
atgattaaatyaggtatagta

SEQ ID NO: 12999 - DNA, 21 bp, Homo sapiens
ggaacccagcwgagaccagaa

SEQ ID NO: 13000 - DNA, 21 bp, Homo sapiens
caggtacacargtatggcaca

SEQ ID NO: 13001 - DNA, 21 bp, Homo sapiens
taacagggccrttcatcgccc

SEQ ID NO: 13002 - DNA, 21 bp, Homo sapiens
ggcaggaggaytgcttaagcc

SEQ ID NO: 13003 - DNA, 21 bp, Homo sapiens
gacattgcatwcagtatgcag

SEQ ID NO: 13004 - DNA, 21 bp, Homo sapiens
tatgtagattygtatcacttc

SEQ ID NO: 13005 - DNA, 21 bp, Homo sapiens
cttcaaactcyggtgagtgat

SEQ ID NO: 13006 - DNA, 21 bp, Homo sapiens
gtcattgccartgctaacagg

SEQ ID NO: 13007 - DNA, 21 bp, Homo sapiens
tgtcagcagcytgactagtat

SEQ ID NO: 13008 - DNA, 21 bp, Homo sapiens
agatgacttayatgattggta

SEQ ID NO: 13009 - DNA, 21 bp, Homo sapiens
atgcttgcagragttgaaagg

SEQ ID NO: 13010 - DNA, 21 bp, Homo sapiens
ataaaaatgawctgacctctg

SEQ ID NO: 13011 - DNA, 21 bp, Homo sapiens
agaggctttcrtatgtggtct

SEQ ID NO: 13012 - DNA, 21 bp, Homo sapiens
ttcgccatacraatctaccat

SEQ ID NO: 13013 - DNA, 21 bp, Homo sapiens
ttgccgtcagraattggctct

SEQ ID NO: 13014 - DNA, 21 bp, Homo sapiens
ggggcccttgyagggtgattc

SEQ ID NO: 13015 - DNA, 21 bp, Homo sapiens
actcttacacygctcagggtg

SEQ ID NO: 13016 - DNA, 21 bp, Homo sapiens
gaagtacataytgatttcaag

SEQ ID NO: 13017 - DNA, 21 bp, Homo sapiens
ttgcaagggtrtagtatttta

SEQ ID NO: 13018 - DNA, 21 bp, Homo sapiens
ctcctgctgtygtaaccacgc

SEQ ID NO: 13019 - DNA, 21 bp, Homo sapiens
agaacacataraggtataaat

SEQ ID NO: 13020 - DNA, 21 bp, Homo sapiens
tttttgagagrtctcctttga

SEQ ID NO: 13021 - DNA, 21 bp, Homo sapiens
caaagaaaaamgtctggttta

SEQ ID NO: 13022 - DNA, 21 bp, Homo sapiens
cagagacataytattttgatt

SEQ ID NO: 13023 - DNA, 21 bp, Homo sapiens
tctgtattaamctttgctgta

SEQ ID NO: 13024 - DNA, 21 bp, Homo sapiens
cttacgacagyccatatattt

SEQ ID NO: 13025 - DNA, 21 bp, Homo sapiens
atttggtctckactcataatt

SEQ ID NO: 13026 - DNA, 21 bp, Homo sapiens
atcttcatcayagttccatct

SEQ ID NO: 13027 - DNA, 21 bp, Homo sapiens
ttaaactcagyctcttgaagc

SEQ ID NO: 13028 - DNA, 21 bp, Homo sapiens
gatccttctcrcttttttggc

SEQ ID NO: 13029 - DNA, 21 bp, Homo sapiens
acagggtaacrtatacttaca

SEQ ID NO: 13030 - DNA, 21 bp, Homo sapiens
aggggacaaarttatttcata

SEQ ID NO: 13031 - DNA, 21 bp, Homo sapiens
agatgcttgcygctatggaat

SEQ ID NO: 13032 - DNA, 21 bp, Homo sapiens
gtctattgcayattggtcttt

SEQ ID NO: 13033 - DNA, 21 bp, Homo sapiens
aattgctctcrtttttgcact

SEQ ID NO: 13034 - DNA, 21 bp, Homo sapiens
gcaacttgaargtcagtccct

SEQ ID NO: 13035 - DNA, 21 bp, Homo sapiens
aaacagtatcrtggagccatc

SEQ ID NO: 13036 - DNA, 21 bp, Homo sapiens
gagagtgaaamgcattgtcat

SEQ ID NO: 13037 - DNA, 21 bp, Homo sapiens
cttggtatttktatttaatta

SEQ ID NO: 13038 - DNA, 21 bp, Homo sapiens
ttgcatgttarcttgggaact

SEQ ID NO: 13039 - DNA, 21 bp, Homo sapiens
ttgctaaacarcaggcagctt

SEQ ID NO: 13040 - DNA, 21 bp, Homo sapiens
ggcccgggccrgggatgtatc

SEQ ID NO: 13041 - DNA, 21 bp, Homo sapiens
cctcacccacrctactcgcgt

SEQ ID NO: 13042 - DNA, 21 bp, Homo sapiens
agtcagaatarttctatttaa

SEQ ID NO: 13043 - DNA, 21 bp, Homo sapiens
aacaaaatacmttgtaaaaaa

SEQ ID NO: 13044 - DNA, 21 bp, Homo sapiens
ggattctgagwgggatctgaa

SEQ ID NO: 13045 - DNA, 21 bp, Homo sapiens
cactggtgcaygaagtcttct

SEQ ID NO: 13046 - DNA, 21 bp, Homo sapiens
atcataatcarttggctagtt

SEQ ID NO: 13047 - DNA, 21 bp, Homo sapiens
caggtgattcraaggtgtgaa

SEQ ID NO: 13048 - DNA, 21 bp, Homo sapiens
ttaagatgaamaagagtgttg

SEQ ID NO: 13049 - DNA, 21 bp, Homo sapiens
tgcttgttctkggaaagtaat

SEQ ID NO: 13050 - DNA, 21 bp, Homo sapiens
gaaagacgttstagtggatct

SEQ ID NO: 13051 - DNA, 21 bp, Homo sapiens
ggtatgacttyctcccggatt

SEQ ID NO: 13052 - DNA, 21 bp, Homo sapiens
ctcagagtccrgaattttcag

SEQ ID NO: 13053 - DNA, 21 bp, Homo sapiens
tgctataggakattttctttt

SEQ ID NO: 13054 - DNA, 21 bp, Homo sapiens
attagaccacygacaccaatc

SEQ ID NO: 13055 - DNA, 21 bp, Homo sapiens
atttagaaagyagctagaggt

SEQ ID NO: 13056 - DNA, 21 bp, Homo sapiens
tcacactataraatcagactt

SEQ ID NO: 13057 - DNA, 21 bp, Homo sapiens
tcaagttatarctgtctcaaa

SEQ ID NO: 13058 - DNA, 21 bp, Homo sapiens
atttgttataygattaccttt

SEQ ID NO: 13059 - DNA, 21 bp, Homo sapiens
tggagttcacytaatctcagc

SEQ ID NO: 13060 - DNA, 21 bp, Homo sapiens
gaaaatccatrattaaaagct

SEQ ID NO: 13061 - DNA, 21 bp, Homo sapiens
tgccagaaagyccatgaggtt

SEQ ID NO: 13062 - DNA, 21 bp, Homo sapiens
ttgagttattyttttgacagg

SEQ ID NO: 13063 - DNA, 21 bp, Homo sapiens
ggcatactttrtggaaaaatg

SEQ ID NO: 13064 - DNA, 21 bp, Homo sapiens
taaggtggtayctgattcaca

SEQ ID NO: 13065 - DNA, 21 bp, Homo sapiens
aattttagtawctccagattt

SEQ ID NO: 13066 - DNA, 21 bp, Homo sapiens
actgtataacygactcatagg

SEQ ID NO: 13067 - DNA, 21 bp, Homo sapiens
aaatatatacrttagttccag

SEQ ID NO: 13068 - DNA, 21 bp, Homo sapiens
gttatcatctrtataatgcaa

SEQ ID NO: 13069 - DNA, 21 bp, Homo sapiens
acaagcagctrggtttgagat

SEQ ID NO: 13070 - DNA, 21 bp, Homo sapiens
gtaatattccytctactttgg

SEQ ID NO: 13071 - DNA, 21 bp, Homo sapiens
tttaaagatcwgatggtttac

SEQ ID NO: 13072 - DNA, 21 bp, Homo sapiens
atacagtgttrtcagaaagaa

SEQ ID NO: 13073 - DNA, 21 bp, Homo sapiens
catcttcctckctgttcgtgt

SEQ ID NO: 13074 - DNA, 21 bp, Homo sapiens
cagttttgtayaacattttgc

SEQ ID NO: 13075 - DNA, 21 bp, Homo sapiens
tttcatggacyaggcccaggg

SEQ ID NO: 13076 - DNA, 21 bp, Homo sapiens
tcctttaagtyttactgatta

SEQ ID NO: 13077 - DNA, 21 bp, Homo sapiens
tctttccctaygatatgttaa

SEQ ID NO: 13078 - DNA, 21 bp, Homo sapiens
tggatagatamcagagttaat

SEQ ID NO: 13079 - DNA, 21 bp, Homo sapiens
gtaaactaacrtgccattacc

SEQ ID NO: 13080 - DNA, 21 bp, Homo sapiens
gaaatgaagartaccttctca

SEQ ID NO: 13081 - DNA, 21 bp, Homo sapiens
ttgttaatagmaagtgattgt

SEQ ID NO: 13082 - DNA, 21 bp, Homo sapiens
tatgtcaatgmtcatttataa

SEQ ID NO: 13083 - DNA, 21 bp, Homo sapiens
cagttcaaatwctaagtaatt

SEQ ID NO: 13084 - DNA, 21 bp, Homo sapiens
ttatatatgaygatttccctc

SEQ ID NO: 13085 - DNA, 21 bp, Homo sapiens
ctatccgtaamatgctagttt

SEQ ID NO: 13086 - DNA, 21 bp, Homo sapiens
ctagagtacayggcaatatca

SEQ ID NO: 13087 - DNA, 21 bp, Homo sapiens
tttgaaagacsttcctggagg

SEQ ID NO: 13088 - DNA, 21 bp, Homo sapiens
attttattagyttcaaatgcc

SEQ ID NO: 13089 - DNA, 21 bp, Homo sapiens
cttctgcaagyccttgggcat

SEQ ID NO: 13090 - DNA, 21 bp, Homo sapiens
tctatctattyggtctttcta

SEQ ID NO: 13091 - DNA, 21 bp, Homo sapiens
gagacataaartaagagtggc

SEQ ID NO: 13092 - DNA, 21 bp, Homo sapiens
gtgccacacaygagctcaggt

SEQ ID NO: 13093 - DNA, 21 bp, Homo sapiens
cataaattcamgagtgggaat

SEQ ID NO: 13094 - DNA, 21 bp, Homo sapiens
tgaggtgctgyctttgaagaa

SEQ ID NO: 13095 - DNA, 21 bp, Homo sapiens
tgtttggttgmccccattttt

SEQ ID NO: 13096 - DNA, 21 bp, Homo sapiens
cacacttctawgccttccagc

SEQ ID NO: 13097 - DNA, 21 bp, Homo sapiens
cctattttgartccactggaa

SEQ ID NO: 13098 - DNA, 21 bp, Homo sapiens
ctaatctctartaagaagctg

SEQ ID NO: 13099 - DNA, 21 bp, Homo sapiens
tccagctagcyatccacaaac

SEQ ID NO: 13100 - DNA, 21 bp, Homo sapiens
tggaactgttygctgtgcaag

SEQ ID NO: 13101 - DNA, 21 bp, Homo sapiens
tatcaaaaacrtaattctgca

SEQ ID NO: 13102 - DNA, 21 bp, Homo sapiens
cttctttaacrtgcacaacaa

SEQ ID NO: 13103 - DNA, 21 bp, Homo sapiens
acccagatgcygaagggaatc

SEQ ID NO: 13104 - DNA, 21 bp, Homo sapiens
ttacagattayggcttctatc

SEQ ID NO: 13105 - DNA, 21 bp, Homo sapiens
tctttcttacrctttgaattt

SEQ ID NO: 13106 - DNA, 21 bp, Homo sapiens
ggacttcttcrggatgatctc

SEQ ID NO: 13107 - DNA, 21 bp, Homo sapiens
gttgttatcaygaccatttga

SEQ ID NO: 13108 - DNA, 21 bp, Homo sapiens
tgtaataggcmagagttgagt

SEQ ID NO: 13109 - DNA, 21 bp, Homo sapiens
ttgcaaggatrtcagggaact

SEQ ID NO: 13110 - DNA, 21 bp, Homo sapiens
tgctcaagtgwaatcgacaac

SEQ ID NO: 13111 - DNA, 21 bp, Homo sapiens
gactgttgatrtggtgactct

SEQ ID NO: 13112 - DNA, 21 bp, Homo sapiens
atcagggtacrggaacaccca

SEQ ID NO: 13113 - DNA, 21 bp, Homo sapiens
tttaaccttamaattacaaga

SEQ ID NO: 13114 - DNA, 21 bp, Homo sapiens
cttatctcagygatttcatcg

SEQ ID NO: 13115 - DNA, 21 bp, Homo sapiens
actctattttrcaaactgatt

SEQ ID NO: 13116 - DNA, 21 bp, Homo sapiens
ttcgatttccsacattttttc

SEQ ID NO: 13117 - DNA, 21 bp, Homo sapiens
tgttatttccrtcgttttatt

SEQ ID NO: 13118 - DNA, 21 bp, Homo sapiens
aaaggcaagcmaggcctacat

SEQ ID NO: 13119 - DNA, 21 bp, Homo sapiens
aaaaggagtcrgcaaatgatc

SEQ ID NO: 13120 - DNA, 21 bp, Homo sapiens
actgacccctyatgtgtccca

SEQ ID NO: 13121 - DNA, 21 bp, Homo sapiens
ctgaagtgtaygaccaagaca

SEQ ID NO: 13122 - DNA, 21 bp, Homo sapiens
tggccttgctyggcaggaaca

SEQ ID NO: 13123 - DNA, 21 bp, Homo sapiens
atgccctggawaaatgatacc

SEQ ID NO: 13124 - DNA, 21 bp, Homo sapiens
gttgcagaatsctatgcaaaa

SEQ ID NO: 13125 - DNA, 21 bp, Homo sapiens
cacggggccaygcgtgctctt

SEQ ID NO: 13126 - DNA, 21 bp, Homo sapiens
tgaatagagakcctgggcctc

SEQ ID NO: 13127 - DNA, 21 bp, Homo sapiens
ctatttcctasaactgcttcc

SEQ ID NO: 13128 - DNA, 21 bp, Homo sapiens
cagcctcaggwgaatgaaaaa

SEQ ID NO: 13129 - DNA, 21 bp, Homo sapiens
agagggccccrgctcaaagaa

SEQ ID NO: 13130 - DNA, 21 bp, Homo sapiens
ctcgcctaacmatatttgtcc

SEQ ID NO: 13131 - DNA, 21 bp, Homo sapiens
ttcatctttcrtttctaattg

SEQ ID NO: 13132 - DNA, 21 bp, Homo sapiens
ctcagaaattsaagtgatata

SEQ ID NO: 13133 - DNA, 21 bp, Homo sapiens
tatggtactcyggtgacccca

SEQ ID NO: 13134 - DNA, 21 bp, Homo sapiens
tcatggattasaaagccaaat

SEQ ID NO: 13135 - DNA, 21 bp, Homo sapiens
actccaaaccragacagttca

SEQ ID NO: 13136 - DNA, 21 bp, Homo sapiens
catgagaggtrctaattaggc

SEQ ID NO: 13137 - DNA, 21 bp, Homo sapiens
ttcattgttarggatgttaga

SEQ ID NO: 13138 - DNA, 21 bp, Homo sapiens
tcctggctccrtgaactcagg

SEQ ID NO: 13139 - DNA, 21 bp, Homo sapiens
gtgttctttcyaatttttgag

SEQ ID NO: 13140 - DNA, 21 bp, Homo sapiens
tcccataagayggatttcttc

SEQ ID NO: 13141 - DNA, 21 bp, Homo sapiens
aggagctgctrtgagtagtgg

SEQ ID NO: 13142 - DNA, 21 bp, Homo sapiens
tacggtgcctyagttaatccc

SEQ ID NO: 13143 - DNA, 21 bp, Homo sapiens
ggagacttccyttttgacaat

SEQ ID NO: 13144 - DNA, 21 bp, Homo sapiens
ttttggcagarcatagaaaat

SEQ ID NO: 13145 - DNA, 21 bp, Homo sapiens
cataggacttkcttttagtag

SEQ ID NO: 13146 - DNA, 21 bp, Homo sapiens
taaacccggarcctccaggtg

SEQ ID NO: 13147 - DNA, 21 bp, Homo sapiens
agcccagtggwcattatgctt

SEQ ID NO: 13148 - DNA, 21 bp, Homo sapiens
aaatacagacrgttcttgaac

SEQ ID NO: 13149 - DNA, 21 bp, Homo sapiens
tataaatgtaygtttattatt

SEQ ID NO: 13150 - DNA, 21 bp, Homo sapiens
tacatgcccaytcatacacac

SEQ ID NO: 13151 - DNA, 21 bp, Homo sapiens
acaaatgaccwtgggcgtcca

SEQ ID NO: 13152 - DNA, 21 bp, Homo sapiens
gacctcacccrcccagaagtt

SEQ ID NO: 13153 - DNA, 21 bp, Homo sapiens
atatgttcctsgttgggttta

SEQ ID NO: 13154 - DNA, 21 bp, Homo sapiens
gtgggactcakcgaacactgg

SEQ ID NO: 13155 - DNA, 21 bp, Homo sapiens
aactttttggrtcatcaagaa

SEQ ID NO: 13156 - DNA, 21 bp, Homo sapiens
cagccctccamccgactcatg

SEQ ID NO: 13157 - DNA, 21 bp, Homo sapiens
agtaaaatgarcacaacaaga

SEQ ID NO: 13158 - DNA, 21 bp, Homo sapiens
aacaccctcaytgggcagact

SEQ ID NO: 13159 - DNA, 21 bp, Homo sapiens
ttccgtgcaayagaacgtgac

SEQ ID NO: 13160 - DNA, 21 bp, Homo sapiens
ggctggaggtygaattggctg

SEQ ID NO: 13161 - DNA, 21 bp, Homo sapiens
aaggggtccaytccaaccttc

SEQ ID NO: 13162 - DNA, 21 bp, Homo sapiens
gaactcaaccrcagagacacc

SEQ ID NO: 13163 - DNA, 21 bp, Homo sapiens
gctcctactcrgcaacatcag

SEQ ID NO: 13164 - DNA, 21 bp, Homo sapiens
tgaattggaarcacaggtctt

SEQ ID NO: 13165 - DNA, 21 bp, Homo sapiens
gagctaggttscagaagatga

SEQ ID NO: 13166 - DNA, 21 bp, Homo sapiens
gttttcacacrgacagggtat

SEQ ID NO: 13167 - DNA, 21 bp, Homo sapiens
cagagtataayggaatatttg

SEQ ID NO: 13168 - DNA, 21 bp, Homo sapiens
tcttggtgagygcacagctca

SEQ ID NO: 13169 - DNA, 21 bp, Homo sapiens
ttgagatggcktaacaatctt

SEQ ID NO: 13170 - DNA, 21 bp, Homo sapiens
ctccggacctyggctgcagag

SEQ ID NO: 13171 - DNA, 21 bp, Homo sapiens
acaaaatatckccatcatgaa

SEQ ID NO: 13172 - DNA, 21 bp, Homo sapiens
gtttggagcaygggccattgc

SEQ ID NO: 13173 - DNA, 21 bp, Homo sapiens
tacttaattgscactttttct

SEQ ID NO: 13174 - DNA, 21 bp, Homo sapiens
agcaagtgatytctagcatct

SEQ ID NO: 13175 - DNA, 21 bp, Homo sapiens
aatttaatgarcacccttgat

SEQ ID NO: 13176 - DNA, 21 bp, Homo sapiens
caattgacagwtgacttcccc

SEQ ID NO: 13177 - DNA, 21 bp, Homo sapiens
agcctttattycacttccagg

SEQ ID NO: 13178 - DNA, 21 bp, Homo sapiens
gcaaggctgtyggagggatgc

SEQ ID NO: 13179 - DNA, 21 bp, Homo sapiens
gaaagggcttytcccacttgg

SEQ ID NO: 13180 - DNA, 21 bp, Homo sapiens
cagtgattttrtctggactga

SEQ ID NO: 13181 - DNA, 21 bp, Homo sapiens
tttcccatatrttgggctgat

SEQ ID NO: 13182 - DNA, 21 bp, Homo sapiens
tgtgatctctscaagtctcta

SEQ ID NO: 13183 - DNA, 21 bp, Homo sapiens
agtgaaacccrtcatttcagc

SEQ ID NO: 13184 - DNA, 21 bp, Homo sapiens
tagctgagaaygagtgcatga

SEQ ID NO: 13185 - DNA, 21 bp, Homo sapiens
agagagatgastgagggaaag

SEQ ID NO: 13186 - DNA, 21 bp, Homo sapiens
aaagaaaaatrttgtattatt

SEQ ID NO: 13187 - DNA, 21 bp, Homo sapiens
tggaaagtggmccaggatcaa

SEQ ID NO: 13188 - DNA, 21 bp, Homo sapiens
atcattgaackattttttttc

SEQ ID NO: 13189 - DNA, 21 bp, Homo sapiens
gtgtggagccmaagaggggac

SEQ ID NO: 13190 - DNA, 21 bp, Homo sapiens
aggatgggagkgtcctcataa

SEQ ID NO: 13191 - DNA, 21 bp, Homo sapiens
atggctcaccrcctgaatggc

SEQ ID NO: 13192 - DNA, 21 bp, Homo sapiens
cccaggacgaygtcttcccga

SEQ ID NO: 13193 - DNA, 21 bp, Homo sapiens
ggttagacagsgaatttgaag

SEQ ID NO: 13194 - DNA, 21 bp, Homo sapiens
aattaatcctyttctgccttc

SEQ ID NO: 13195 - DNA, 21 bp, Homo sapiens
agcctgtggakgtaggatggt

SEQ ID NO: 13196 - DNA, 21 bp, Homo sapiens
atctgaaatcrtggtctgttg

SEQ ID NO: 13197 - DNA, 21 bp, Homo sapiens
tgctgagatgsaaatcgctga

SEQ ID NO: 13198 - DNA, 21 bp, Homo sapiens
ctggatctgcygtatccacct

SEQ ID NO: 13199 - DNA, 21 bp, Homo sapiens
accactgattkggatataaat

SEQ ID NO: 13200 - DNA, 21 bp, Homo sapiens
aaacccaccasaaaaatacat

SEQ ID NO: 13201 - DNA, 21 bp, Homo sapiens
ggcctatggaytgcagggcag

SEQ ID NO: 13202 - DNA, 21 bp, Homo sapiens
tcctctttcascctcaacctg

SEQ ID NO: 13203 - DNA, 21 bp, Homo sapiens
aaggctgtgcygtcgttcacc

SEQ ID NO: 13204 - DNA, 21 bp, Homo sapiens
gagatgctgcstctgcctgac

SEQ ID NO: 13205 - DNA, 21 bp, Homo sapiens
cttcacctgcrttccctctgt

SEQ ID NO: 13206 - DNA, 21 bp, Homo sapiens
caggagaggcygagggaagag

SEQ ID NO: 13207 - DNA, 21 bp, Homo sapiens
ccacccgataytgctgcatgt

SEQ ID NO: 13208 - DNA, 21 bp, Homo sapiens
aattagacaayctgcgtagtg

SEQ ID NO: 13209 - DNA, 21 bp, Homo sapiens
ccttcgattcrggtgtggatg

SEQ ID NO: 13210 - DNA, 21 bp, Homo sapiens
tctcattttcrtcttctgatg

SEQ ID NO: 13211 - DNA, 21 bp, Homo sapiens
catggaaaccrgcaaaaaacg

SEQ ID NO: 13212 - DNA, 21 bp, Homo sapiens
gggcaagggtygtacctgaat

SEQ ID NO: 13213 - DNA, 21 bp, Homo sapiens
cttaaatgcasgtgagcttgg

SEQ ID NO: 13214 - DNA, 21 bp, Homo sapiens
tcatcctcccwctgaactcat

SEQ ID NO: 13215 - DNA, 21 bp, Homo sapiens
aaattacttgsaagaaattct

SEQ ID NO: 13216 - DNA, 21 bp, Homo sapiens
atggaggcacratacaatctg

SEQ ID NO: 13217 - DNA, 21 bp, Homo sapiens
tattcccaacragaagcttca

SEQ ID NO: 13218 - DNA, 21 bp, Homo sapiens
tggatgagggyggaaggaagg

SEQ ID NO: 13219 - DNA, 21 bp, Homo sapiens
tttgtggcagktgtagagatt

SEQ ID NO: 13220 - DNA, 21 bp, Homo sapiens
tgactcagtgrcggaaccagg

SEQ ID NO: 13221 - DNA, 21 bp, Homo sapiens
accacccagaygtcagttttt

SEQ ID NO: 13222 - DNA, 21 bp, Homo sapiens
caggaatatcygcctcttccc

SEQ ID NO: 13223 - DNA, 21 bp, Homo sapiens
acaagtggagmgcaataaaca

SEQ ID NO: 13224 - DNA, 21 bp, Homo sapiens
aactgtacttyagcttggtca

SEQ ID NO: 13225 - DNA, 21 bp, Homo sapiens
agagtgccagsgtcctaggaa

SEQ ID NO: 13226 - DNA, 21 bp, Homo sapiens
ttttgaaacartgttgctcag

SEQ ID NO: 13227 - DNA, 21 bp, Homo sapiens
gagcacacagygttagataat

SEQ ID NO: 13228 - DNA, 21 bp, Homo sapiens
gcatgccttakggctgaggat

SEQ ID NO: 13229 - DNA, 21 bp, Homo sapiens
tgacagtggartggctgttct

SEQ ID NO: 13230 - DNA, 21 bp, Homo sapiens
tacatgagagyaggaacccca

SEQ ID NO: 13231 - DNA, 21 bp, Homo sapiens
caggaagcagscagcaggtgg

SEQ ID NO: 13232 - DNA, 21 bp, Homo sapiens
tcagattctgraggacaagat

SEQ ID NO: 13233 - DNA, 21 bp, Homo sapiens
gctcaaaaacrtaaaacacca

SEQ ID NO: 13234 - DNA, 21 bp, Homo sapiens
taagtgttggycagatgtcta

SEQ ID NO: 13235 - DNA, 21 bp, Homo sapiens
gcttttctatrtatttgcaac

SEQ ID NO: 13236 - DNA, 21 bp, Homo sapiens
ccttcaggagyattagcctgg

SEQ ID NO: 13237 - DNA, 21 bp, Homo sapiens
gaccagtgccrtgtaaatgtc

SEQ ID NO: 13238 - DNA, 21 bp, Homo sapiens
gagaataaagragacttgcct

SEQ ID NO: 13239 - DNA, 21 bp, Homo sapiens
acaaaagatayaaacaggcaa

SEQ ID NO: 13240 - DNA, 21 bp, Homo sapiens
ctctgatgtarttggtatggt

SEQ ID NO: 13241 - DNA, 21 bp, Homo sapiens
tttggtttaaygagggatagg

SEQ ID NO: 13242 - DNA, 21 bp, Homo sapiens
gtctcatggayggggacaatg

SEQ ID NO: 13243 - DNA, 21 bp, Homo sapiens
tgatatgatgytatgttatgt

SEQ ID NO: 13244 - DNA, 21 bp, Homo sapiens
tgccaccgaakggtattaagc

SEQ ID NO: 13245 - DNA, 21 bp, Homo sapiens
agcagtgccaycagactcctc

SEQ ID NO: 13246 - DNA, 21 bp, Homo sapiens
ggcagcttaamggggatgtgt

SEQ ID NO: 13247 - DNA, 21 bp, Homo sapiens
ggtgtctctgrcccaaatagc

SEQ ID NO: 13248 - DNA, 21 bp, Homo sapiens
gtatacataaktttaaagaaa

SEQ ID NO: 13249 - DNA, 21 bp, Homo sapiens
aatgccaggamtgattcatag

SEQ ID NO: 13250 - DNA, 21 bp, Homo sapiens
gtaaaacaccygcgtcagggt

SEQ ID NO: 13251 - DNA, 21 bp, Homo sapiens
cccttttgaayacacccatgt

SEQ ID NO: 13252 - DNA, 21 bp, Homo sapiens
tctcaggaacycccttggctc

SEQ ID NO: 13253 - DNA, 21 bp, Homo sapiens
ctttactgagkcttgatcaga

SEQ ID NO: 13254 - DNA, 21 bp, Homo sapiens
gttaactggtrcccattgcac

SEQ ID NO: 13255 - DNA, 21 bp, Homo sapiens
aaaataaaacrcaacagctag

SEQ ID NO: 13256 - DNA, 21 bp, Homo sapiens
gtcactgagcygcagcaggcg

SEQ ID NO: 13257 - DNA, 21 bp, Homo sapiens
gaactggaaarctgggaatat

SEQ ID NO: 13258 - DNA, 21 bp, Homo sapiens
accaaaagagrtcagcctcag

SEQ ID NO: 13259 - DNA, 21 bp, Homo sapiens
gcccatcttcrtggatttaag

SEQ ID NO: 13260 - DNA, 21 bp, Homo sapiens
atggaagagtrtctagttcta

SEQ ID NO: 13261 - DNA, 21 bp, Homo sapiens
gggaagggacygcatagttgg

SEQ ID NO: 13262 - DNA, 21 bp, Homo sapiens
tccccttcggraacagagcaa

SEQ ID NO: 13263 - DNA, 21 bp, Homo sapiens
agtccacaggygctaccctgg

SEQ ID NO: 13264 - DNA, 21 bp, Homo sapiens
cgggctagtgyatcctcctca

SEQ ID NO: 13265 - DNA, 21 bp, Homo sapiens
agtaaacgatyttatccacaa

SEQ ID NO: 13266 - DNA, 21 bp, Homo sapiens
atagagaacaycgttgtttta

SEQ ID NO: 13267 - DNA, 21 bp, Homo sapiens
tgagaatgtamagcacacaac

SEQ ID NO: 13268 - DNA, 21 bp, Homo sapiens
tgggaagtgaytggggaaggg

SEQ ID NO: 13269 - DNA, 21 bp, Homo sapiens
cctggccagcrtggaacgcaa

SEQ ID NO: 13270 - DNA, 21 bp, Homo sapiens
agaaacagacytgctcagatc

SEQ ID NO: 13271 - DNA, 21 bp, Homo sapiens
tactaataggygattgctgta

SEQ ID NO: 13272 - DNA, 21 bp, Homo sapiens
ctggcacggtygggaaaggtc

SEQ ID NO: 13273 - DNA, 21 bp, Homo sapiens
cctagagttgyaaaggcctca

SEQ ID NO: 13274 - DNA, 21 bp, Homo sapiens
cgattattcartaaaggaatg

SEQ ID NO: 13275 - DNA, 21 bp, Homo sapiens
tttcaagcctytctattggcc

SEQ ID NO: 13276 - DNA, 21 bp, Homo sapiens
gactaaatctyaagtgcatgc

SEQ ID NO: 13277 - DNA, 21 bp, Homo sapiens
ctaaactgatmtctaagtgag

SEQ ID NO: 13278 - DNA, 21 bp, Homo sapiens
agctgtttttycctgggtcac

SEQ ID NO: 13279 - DNA, 21 bp, Homo sapiens
cctcacaagcrggtgtctagg

SEQ ID NO: 13280 - DNA, 21 bp, Homo sapiens
ctcacttttcrtctgttcctt

SEQ ID NO: 13281 - DNA, 21 bp, Homo sapiens
tgtttgaaggmgggttgctaa

SEQ ID NO: 13282 - DNA, 21 bp, Homo sapiens
gagggtttaaraaacagctgc

SEQ ID NO: 13283 - DNA, 21 bp, Homo sapiens
attgagctccyggatcttcaa

SEQ ID NO: 13284 - DNA, 21 bp, Homo sapiens
aaatatacatsaatactggct

SEQ ID NO: 13285 - DNA, 21 bp, Homo sapiens
gacactgaaamctggaaagga

SEQ ID NO: 13286 - DNA, 21 bp, Homo sapiens
gccaatcctaygaaataaaac

SEQ ID NO: 13287 - DNA, 21 bp, Homo sapiens
gctatatttcytcctctacaa

SEQ ID NO: 13288 - DNA, 21 bp, Homo sapiens
agactagtacrtcctctaaag

SEQ ID NO: 13289 - DNA, 21 bp, Homo sapiens
gttacaataaraacacttgga

SEQ ID NO: 13290 - DNA, 21 bp, Homo sapiens
catattgaagytctacagtta

SEQ ID NO: 13291 - DNA, 21 bp, Homo sapiens
gaaggataacraacaatagct

SEQ ID NO: 13292 - DNA, 21 bp, Homo sapiens
agaaaatgtartatgacaatc

SEQ ID NO: 13293 - DNA, 21 bp, Homo sapiens
attttaactgrgatattcctg

SEQ ID NO: 13294 - DNA, 21 bp, Homo sapiens
aagtgattggyattattgctt

SEQ ID NO: 13295 - DNA, 21 bp, Homo sapiens
taattgttagyctcagggaaa

SEQ ID NO: 13296 - DNA, 21 bp, Homo sapiens
tgaaaagaacktggggtctag

SEQ ID NO: 13297 - DNA, 21 bp, Homo sapiens
cttaaaattcrgggtctttga

SEQ ID NO: 13298 - DNA, 21 bp, Homo sapiens
tagcagttagytgaaacaaca

SEQ ID NO: 13299 - DNA, 21 bp, Homo sapiens
ataatttggtrtaagtgtgga

SEQ ID NO: 13300 - DNA, 21 bp, Homo sapiens
caccatctgcrcaactgcttt

SEQ ID NO: 13301 - DNA, 21 bp, Homo sapiens
gttttttgaaygtggggaaat

SEQ ID NO: 13302 - DNA, 21 bp, Homo sapiens
agaagatgacrctcctgattt

SEQ ID NO: 13303 - DNA, 21 bp, Homo sapiens
ccacagaatgytaccctgaca

SEQ ID NO: 13304 - DNA, 21 bp, Homo sapiens
gagtcctaatktgcaccaggt

SEQ ID NO: 13305 - DNA, 21 bp, Homo sapiens
agtgacatggsattcaaaaaa

SEQ ID NO: 13306 - DNA, 21 bp, Homo sapiens
gcttactattygaaagactgt

SEQ ID NO: 13307 - DNA, 21 bp, Homo sapiens
cctcacattcygcaaccctga

SEQ ID NO: 13308 - DNA, 21 bp, Homo sapiens
tatactcatcrtctttctagg

SEQ ID NO: 13309 - DNA, 21 bp, Homo sapiens
atctctactcycttgcctggc

SEQ ID NO: 13310 - DNA, 21 bp, Homo sapiens
ccagaagggtytgtctaaagc

SEQ ID NO: 13311 - DNA, 21 bp, Homo sapiens
atgactgaatrttagggatga

SEQ ID NO: 13312 - DNA, 21 bp, Homo sapiens
taacacagaamaaatgcacca

SEQ ID NO: 13313 - DNA, 21 bp, Homo sapiens
ggtgcttccayaaagggtgga

SEQ ID NO: 13314 - DNA, 21 bp, Homo sapiens
ggctaatgagrctgaccctgc

SEQ ID NO: 13315 - DNA, 21 bp, Homo sapiens
caagaagcagratgcatcaaa

SEQ ID NO: 13316 - DNA, 21 bp, Homo sapiens
ctgctcaacarggaggagaat

SEQ ID NO: 13317 - DNA, 21 bp, Homo sapiens
tatttaatacsctgcttttgc

SEQ ID NO: 13318 - DNA, 21 bp, Homo sapiens
tgagctgtccrgagtaaaaaa

SEQ ID NO: 13319 - DNA, 21 bp, Homo sapiens
tgactatccayttatctttac

SEQ ID NO: 13320 - DNA, 21 bp, Homo sapiens
gtggagcctgrgatggcctca

SEQ ID NO: 13321 - DNA, 21 bp, Homo sapiens
ccgggtcagcycattagggtc

SEQ ID NO: 13322 - DNA, 21 bp, Homo sapiens
tcccagcccaygaagatcggc

SEQ ID NO: 13323 - DNA, 21 bp, Homo sapiens
ccatgttgagrtcctagctga

SEQ ID NO: 13324 - DNA, 21 bp, Homo sapiens
aaccacaaggycttctgctca

SEQ ID NO: 13325 - DNA, 21 bp, Homo sapiens
tagtgatttcrttatgacaca

SEQ ID NO: 13326 - DNA, 21 bp, Homo sapiens
gtcaaagagaygccaagatta

SEQ ID NO: 13327 - DNA, 21 bp, Homo sapiens
tcatagccttygcctctgaac

SEQ ID NO: 13328 - DNA, 21 bp, Homo sapiens
caaaaactcayacacgaagca

SEQ ID NO: 13329 - DNA, 21 bp, Homo sapiens
caccaaaaaayggatcaggag

SEQ ID NO: 13330 - DNA, 21 bp, Homo sapiens
cagtcactgaytttcatttaa

SEQ ID NO: 13331 - DNA, 21 bp, Homo sapiens
tcactaacatkggcagtcata

SEQ ID NO: 13332 - DNA, 21 bp, Homo sapiens
ctaatgttatyagctataccc

SEQ ID NO: 13333 - DNA, 21 bp, Homo sapiens
agcatcctgtrtcttaaaagc

SEQ ID NO: 13334 - DNA, 21 bp, Homo sapiens
attagaaacarattaggcaaa

SEQ ID NO: 13335 - DNA, 21 bp, Homo sapiens
tgcctgagaaytggagcgaag

SEQ ID NO: 13336 - DNA, 21 bp, Homo sapiens
tctcatcaggmaagaaagaag

SEQ ID NO: 13337 - DNA, 21 bp, Homo sapiens
aacatggtatktgaggcaaat

SEQ ID NO: 13338 - DNA, 21 bp, Homo sapiens
ctgcggtatgrggttatgttt

SEQ ID NO: 13339 - DNA, 21 bp, Homo sapiens
gccctgtgtcygcgtcaagca

SEQ ID NO: 13340 - DNA, 21 bp, Homo sapiens
ggatggattcrgatttgcctc

SEQ ID NO: 13341 - DNA, 21 bp, Homo sapiens
gccaccttcascaccctttcc

SEQ ID NO: 13342 - DNA, 21 bp, Homo sapiens
ggccaccttcygctgggtagc

SEQ ID NO: 13343 - DNA, 21 bp, Homo sapiens
ctcctgagtcyttactgatac

SEQ ID NO: 13344 - DNA, 21 bp, Homo sapiens
tctatcttgcrgggtctgatg

SEQ ID NO: 13345 - DNA, 21 bp, Homo sapiens
gcaactgaacrtaactgtttt

SEQ ID NO: 13346 - DNA, 21 bp, Homo sapiens
atcagtgatamtgcgttctac

SEQ ID NO: 13347 - DNA, 21 bp, Homo sapiens
gaaaatggaamttgtctttac

SEQ ID NO: 13348 - DNA, 21 bp, Homo sapiens
atgactgtgtwttttgaaatc

SEQ ID NO: 13349 - DNA, 21 bp, Homo sapiens
gccattggtckttctcctctc

SEQ ID NO: 13350 - DNA, 21 bp, Homo sapiens
ggcctaagcaygcattttttc

SEQ ID NO: 13351 - DNA, 21 bp, Homo sapiens
gacaaagtgargtaggtaaaa

SEQ ID NO: 13352 - DNA, 21 bp, Homo sapiens
ggtagatccayagaagacagg

SEQ ID NO: 13353 - DNA, 21 bp, Homo sapiens
aggtgaataawctgacatcac

SEQ ID NO: 13354 - DNA, 21 bp, Homo sapiens
ttttctgatamtgccttgaat

SEQ ID NO: 13355 - DNA, 21 bp, Homo sapiens
ccagcaaaacmaacagggagc

SEQ ID NO: 13356 - DNA, 21 bp, Homo sapiens
ccctaagatgwtcctaagaag

SEQ ID NO: 13357 - DNA, 21 bp, Homo sapiens
tttcccaatcytaagcagccc

SEQ ID NO: 13358 - DNA, 21 bp, Homo sapiens
cgtatgctctsaaagctagga

SEQ ID NO: 13359 - DNA, 21 bp, Homo sapiens
ttacaatcaaygatattgaga

SEQ ID NO: 13360 - DNA, 21 bp, Homo sapiens
gcagctttccmatcacttact

SEQ ID NO: 13361 - DNA, 21 bp, Homo sapiens
cactgctgctkttccatagaa

SEQ ID NO: 13362 - DNA, 21 bp, Homo sapiens
agagctccaayttttagaaac

SEQ ID NO: 13363 - DNA, 21 bp, Homo sapiens
tagagagctcracaccactcc

SEQ ID NO: 13364 - DNA, 21 bp, Homo sapiens
agagcagtgcrccagggaagg

SEQ ID NO: 13365 - DNA, 21 bp, Homo sapiens
actgtacagakaagatgcctg

SEQ ID NO: 13366 - DNA, 21 bp, Homo sapiens
caaccacatcrcccagaatgt

SEQ ID NO: 13367 - DNA, 21 bp, Homo sapiens
tggcagttctyggcctctgct

SEQ ID NO: 13368 - DNA, 21 bp, Homo sapiens
ttgattcccargcgtgggtct

SEQ ID NO: 13369 - DNA, 21 bp, Homo sapiens
ttcatctgtaytgattgacta

SEQ ID NO: 13370 - DNA, 21 bp, Homo sapiens
gcttccttgtyggttccattt

SEQ ID NO: 13371 - DNA, 21 bp, Homo sapiens
catcctaacaratcttgccag

SEQ ID NO: 13372 - DNA, 21 bp, Homo sapiens
acatggtaacycagcctggct

SEQ ID NO: 13373 - DNA, 21 bp, Homo sapiens
gaatataagayggagtcatta

SEQ ID NO: 13374 - DNA, 21 bp, Homo sapiens
catgtattttyggaattacgt

SEQ ID NO: 13375 - DNA, 21 bp, Homo sapiens
ataagggtgckagaccaagat

SEQ ID NO: 13376 - DNA, 21 bp, Homo sapiens
ttataaaaccrgttgcactcc

SEQ ID NO: 13377 - DNA, 21 bp, Homo sapiens
tcctcattcaraattgttatt

SEQ ID NO: 13378 - DNA, 21 bp, Homo sapiens
ctgtattgtascaagcactat

SEQ ID NO: 13379 - DNA, 21 bp, Homo sapiens
gttgccagcaytcagagcctc

SEQ ID NO: 13380 - DNA, 21 bp, Homo sapiens
attatccaggyaagagtatgg

SEQ ID NO: 13381 - DNA, 21 bp, Homo sapiens
acgtatgtgcmtgcagacaaa

SEQ ID NO: 13382 - DNA, 21 bp, Homo sapiens
tagtatgtacmtagttttgac

SEQ ID NO: 13383 - DNA, 21 bp, Homo sapiens
attttaatcartgattgctag

SEQ ID NO: 13384 - DNA, 21 bp, Homo sapiens
ctgaagaccaycctgttgcta

SEQ ID NO: 13385 - DNA, 21 bp, Homo sapiens
gtcaggtactrtccccttccg

SEQ ID NO: 13386 - DNA, 21 bp, Homo sapiens
tggttgaaacytctagtagac

SEQ ID NO: 13387 - DNA, 21 bp, Homo sapiens
tacagggtatrggtcgagctg

SEQ ID NO: 13388 - DNA, 21 bp, Homo sapiens
cagcatcccgyaggatacctt

SEQ ID NO: 13389 - DNA, 21 bp, Homo sapiens
gtgataaaaasaacatcttaa

SEQ ID NO: 13390 - DNA, 21 bp, Homo sapiens
tcagtatatayagattttgct

SEQ ID NO: 13391 - DNA, 21 bp, Homo sapiens
taatgatagcraaaatgatga

SEQ ID NO: 13392 - DNA, 21 bp, Homo sapiens
acacagtgtayattttaaact

SEQ ID NO: 13393 - DNA, 21 bp, Homo sapiens
atagcaggtgytcaggaacta

SEQ ID NO: 13394 - DNA, 21 bp, Homo sapiens
gatgctgtgaktaataaaatg

SEQ ID NO: 13395 - DNA, 21 bp, Homo sapiens
cctgcaacccrttttcacaca

SEQ ID NO: 13396 - DNA, 21 bp, Homo sapiens
aatacctctayactttcccac

SEQ ID NO: 13397 - DNA, 21 bp, Homo sapiens
aaggaccatcktccagtgtct

SEQ ID NO: 13398 - DNA, 21 bp, Homo sapiens
cactaaattgrcagggcctgg

SEQ ID NO: 13399 - DNA, 21 bp, Homo sapiens
tcttcacatcratatggtaaa

SEQ ID NO: 13400 - DNA, 21 bp, Homo sapiens
agtgtatgcaygagcaggcca

SEQ ID NO: 13401 - DNA, 21 bp, Homo sapiens
aagctacagawccaccagcga

SEQ ID NO: 13402 - DNA, 21 bp, Homo sapiens
acaagagcaakctgaccatgg

SEQ ID NO: 13403 - DNA, 21 bp, Homo sapiens
gactcccacaygccatttttt

SEQ ID NO: 13404 - DNA, 21 bp, Homo sapiens
agttatgcgtrttctttttcc

SEQ ID NO: 13405 - DNA, 21 bp, Homo sapiens
taagacctgcsctggccagtc

SEQ ID NO: 13406 - DNA, 21 bp, Homo sapiens
catgacacagrcccagaggca

SEQ ID NO: 13407 - DNA, 21 bp, Homo sapiens
cctttgccagrgcctggaagc

SEQ ID NO: 13408 - DNA, 21 bp, Homo sapiens
tctttatatcyggacaagaga

SEQ ID NO: 13409 - DNA, 21 bp, Homo sapiens
actccacctcrgaattcaagt

SEQ ID NO: 13410 - DNA, 21 bp, Homo sapiens
aaacagagtcrgctttagcat

SEQ ID NO: 13411 - DNA, 21 bp, Homo sapiens
tgagaagaaakctcaaagagg

SEQ ID NO: 13412 - DNA, 21 bp, Homo sapiens
ggatttaggtrcagttctact

SEQ ID NO: 13413 - DNA, 21 bp, Homo sapiens
tacgacactaycattatgttc

SEQ ID NO: 13414 - DNA, 21 bp, Homo sapiens
actccagcacyggggaaagtg

SEQ ID NO: 13415 - DNA, 21 bp, Homo sapiens
ccctcgtgcasatattcactc

SEQ ID NO: 13416 - DNA, 21 bp, Homo sapiens
ctgttttctgyaggagggacc

SEQ ID NO: 13417 - DNA, 21 bp, Homo sapiens
acaagttaatmcctccatgaa

SEQ ID NO: 13418 - DNA, 21 bp, Homo sapiens
acagaagagamgcacttgtgc

SEQ ID NO: 13419 - DNA, 21 bp, Homo sapiens
gatttcacaargacaggcatc

SEQ ID NO: 13420 - DNA, 21 bp, Homo sapiens
taccctctcartttggaagtt

SEQ ID NO: 13421 - DNA, 21 bp, Homo sapiens
gaaaagactayatggaagaga

SEQ ID NO: 13422 - DNA, 21 bp, Homo sapiens
ttggggtgcayttgagtcacc

SEQ ID NO: 13423 - DNA, 21 bp, Homo sapiens
tcctcctttaytctccataga

SEQ ID NO: 13424 - DNA, 21 bp, Homo sapiens
aaagaaatagygtctgagatc

SEQ ID NO: 13425 - DNA, 21 bp, Homo sapiens
tccaaacattkttccaaactt

SEQ ID NO: 13426 - DNA, 21 bp, Homo sapiens
tagtaccgctmacttaatccc

SEQ ID NO: 13427 - DNA, 21 bp, Homo sapiens
gaacagatggkagtactaaag

SEQ ID NO: 13428 - DNA, 21 bp, Homo sapiens
caaggaccaargtagtgaagc

SEQ ID NO: 13429 - DNA, 21 bp, Homo sapiens
gaaaggggaawcacccatcct

SEQ ID NO: 13430 - DNA, 21 bp, Homo sapiens
tctattggctmccagcaccag

SEQ ID NO: 13431 - DNA, 21 bp, Homo sapiens
aaaaatgcaartcctaaaaca

SEQ ID NO: 13432 - DNA, 21 bp, Homo sapiens
catttctagasacttcctgtt

SEQ ID NO: 13433 - DNA, 21 bp, Homo sapiens
cccttacacayacttcccttt

SEQ ID NO: 13434 - DNA, 21 bp, Homo sapiens
tgcaggttttygctcttaaac

SEQ ID NO: 13435 - DNA, 21 bp, Homo sapiens
tgggaccaagytgagtaccac

SEQ ID NO: 13436 - DNA, 21 bp, Homo sapiens
gaatcgattcmcaatttatga

SEQ ID NO: 13437 - DNA, 21 bp, Homo sapiens
gatggttggcrtggagcagct

SEQ ID NO: 13438 - DNA, 21 bp, Homo sapiens
ctgacagagaygatgttattt

SEQ ID NO: 13439 - DNA, 21 bp, Homo sapiens
tctcctggagkcaagtgcttc

SEQ ID NO: 13440 - DNA, 21 bp, Homo sapiens
ggttctcacastgtgccaccc

SEQ ID NO: 13441 - DNA, 21 bp, Homo sapiens
tcccggctcascacagacagg

SEQ ID NO: 13442 - DNA, 21 bp, Homo sapiens
ttgaccttctstaggtgctcg

SEQ ID NO: 13443 - DNA, 21 bp, Homo sapiens
gtaaacgaagsattttgtttt

SEQ ID NO: 13444 - DNA, 21 bp, Homo sapiens
cttaatgtcawctagacacat

SEQ ID NO: 13445 - DNA, 21 bp, Homo sapiens
caccagtcatyggagtgaggg

SEQ ID NO: 13446 - DNA, 21 bp, Homo sapiens
atataattttygcaataatcc

SEQ ID NO: 13447 - DNA, 21 bp, Homo sapiens
tttgtctattstatcattttc

SEQ ID NO: 13448 - DNA, 21 bp, Homo sapiens
caagtctgctrggcaaggtcc

SEQ ID NO: 13449 - DNA, 21 bp, Homo sapiens
tggcttttggyatgaaaggaa

SEQ ID NO: 13450 - DNA, 21 bp, Homo sapiens
ctgctgacttyggtggcctga

SEQ ID NO: 13451 - DNA, 21 bp, Homo sapiens
atcattcatastggctgctgc

SEQ ID NO: 13452 - DNA, 21 bp, Homo sapiens
cacatctaacrcagaaggaaa

SEQ ID NO: 13453 - DNA, 21 bp, Homo sapiens
aataaaagtckgatcgttttg

SEQ ID NO: 13454 - DNA, 21 bp, Homo sapiens
ctctccattayactctggaga

SEQ ID NO: 13455 - DNA, 21 bp, Homo sapiens
atctataccaygctacccagg

SEQ ID NO: 13456 - DNA, 21 bp, Homo sapiens
aatgcacaagrgttgaaggga

SEQ ID NO: 13457 - DNA, 21 bp, Homo sapiens
tgtacatgtcracgatcttct

SEQ ID NO: 13458 - DNA, 21 bp, Homo sapiens
tccatcaaacrcggggtcaag

SEQ ID NO: 13459 - DNA, 21 bp, Homo sapiens
ttatgcctgamttataatcgc

SEQ ID NO: 13460 - DNA, 21 bp, Homo sapiens
tacaagatcgycctcaaaccc

SEQ ID NO: 13461 - DNA, 21 bp, Homo sapiens
tgatgcttctsaagtctccat

SEQ ID NO: 13462 - DNA, 21 bp, Homo sapiens
catcacagagmtgacatgtta

SEQ ID NO: 13463 - DNA, 21 bp, Homo sapiens
gtgggtatacmgaagagaatt

SEQ ID NO: 13464 - DNA, 21 bp, Homo sapiens
ccgtcttgggstagtacgtac

SEQ ID NO: 13465 - DNA, 21 bp, Homo sapiens
agtggtaatawgaaaaatacc

SEQ ID NO: 13466 - DNA, 21 bp, Homo sapiens
gaagattttcygctttatttt

SEQ ID NO: 13467 - DNA, 21 bp, Homo sapiens
acaagcttatrtgacaaatgg

SEQ ID NO: 13468 - DNA, 21 bp, Homo sapiens
cataagccccyataatttgtg

SEQ ID NO: 13469 - DNA, 21 bp, Homo sapiens
agatgtgctgktatcactggg

SEQ ID NO: 13470 - DNA, 21 bp, Homo sapiens
ttcagctttawcttttgccat

SEQ ID NO: 13471 - DNA, 21 bp, Homo sapiens
aattgcatgtkggaaacactg

SEQ ID NO: 13472 - DNA, 21 bp, Homo sapiens
caagatcaacmgttttcccaa

SEQ ID NO: 13473 - DNA, 21 bp, Homo sapiens
ccacattgccrtgctaactgg

SEQ ID NO: 13474 - DNA, 21 bp, Homo sapiens
tacactttatraatgaaatgg

SEQ ID NO: 13475 - DNA, 21 bp, Homo sapiens
cagcataatasgaagaccttg

SEQ ID NO: 13476 - DNA, 21 bp, Homo sapiens
aggcaggtgaycccttagaga

SEQ ID NO: 13477 - DNA, 21 bp, Homo sapiens
acaagtaaaasagaaaactca

SEQ ID NO: 13478 - DNA, 21 bp, Homo sapiens
cttcactatcwgataaaatgt

SEQ ID NO: 13479 - DNA, 21 bp, Homo sapiens
tgtggaaccayggcaccaact

SEQ ID NO: 13480 - DNA, 21 bp, Homo sapiens
ggcctgtttamaatatttact

SEQ ID NO: 13481 - DNA, 21 bp, Homo sapiens
agctcaagagrctccaagaca

SEQ ID NO: 13482 - DNA, 21 bp, Homo sapiens
acagctcagarggaggtgagc

SEQ ID NO: 13483 - DNA, 21 bp, Homo sapiens
aagcaccctgygaccgtgtgg

SEQ ID NO: 13484 - DNA, 21 bp, Homo sapiens
ggcccaacttscctattagaa

SEQ ID NO: 13485 - DNA, 21 bp, Homo sapiens
ataaaaaggtrtttggatgcc

SEQ ID NO: 13486 - DNA, 21 bp, Homo sapiens
cacagattatygaccacctac

SEQ ID NO: 13487 - DNA, 21 bp, Homo sapiens
gcagaagtggratgtttcaga

SEQ ID NO: 13488 - DNA, 21 bp, Homo sapiens
atcgtagattsattgattttg

SEQ ID NO: 13489 - DNA, 21 bp, Homo sapiens
tctatgacaasgtactcttct

SEQ ID NO: 13490 - DNA, 21 bp, Homo sapiens
tagatttgctsttttgctctt

SEQ ID NO: 13491 - DNA, 21 bp, Homo sapiens
tgcgctcccartgcctactat

SEQ ID NO: 13492 - DNA, 21 bp, Homo sapiens
tagtaatgccrgcttttctac

SEQ ID NO: 13493 - DNA, 21 bp, Homo sapiens
accctagaagwctttcaattt

SEQ ID NO: 13494 - DNA, 21 bp, Homo sapiens
gtttttgtagrtattatagga

SEQ ID NO: 13495 - DNA, 21 bp, Homo sapiens
tgtacctattycttaaggcta

SEQ ID NO: 13496 - DNA, 21 bp, Homo sapiens
ctcaaaatgtkattgagactc

SEQ ID NO: 13497 - DNA, 21 bp, Homo sapiens
ttaattatccrtatttatagc

SEQ ID NO: 13498 - DNA, 21 bp, Homo sapiens
cagggaatctsttcatgaact

SEQ ID NO: 13499 - DNA, 21 bp, Homo sapiens
ttgaagatgcytgtcaatgaa

SEQ ID NO: 13500 - DNA, 21 bp, Homo sapiens
tttggcaaccwagtccctcaa

SEQ ID NO: 13501 - DNA, 21 bp, Homo sapiens
tgtatcacatscactgaagac

SEQ ID NO: 13502 - DNA, 21 bp, Homo sapiens
ataatacataygaaaaaggac

SEQ ID NO: 13503 - DNA, 21 bp, Homo sapiens
atatctggccragagggatga

SEQ ID NO: 13504 - DNA, 21 bp, Homo sapiens
aatctattggyatccacagga

SEQ ID NO: 13505 - DNA, 21 bp, Homo sapiens
ggaaattccarttccttcttt

SEQ ID NO: 13506 - DNA, 21 bp, Homo sapiens
agacacacacrgtaaccaagt

SEQ ID NO: 13507 - DNA, 21 bp, Homo sapiens
aggcggggaakggtattccaa

SEQ ID NO: 13508 - DNA, 21 bp, Homo sapiens
cagagtcgcasaggatcgggg

SEQ ID NO: 13509 - DNA, 21 bp, Homo sapiens
ggaagtgcccrttctcagtgt

SEQ ID NO: 13510 - DNA, 21 bp, Homo sapiens
cagatgacgtyttagttttag

SEQ ID NO: 13511 - DNA, 21 bp, Homo sapiens
ctcgacttcamtggggataag

SEQ ID NO: 13512 - DNA, 21 bp, Homo sapiens
aactggttagygtttgcaatc

SEQ ID NO: 13513 - DNA, 21 bp, Homo sapiens
tagaggtcagyggcactggcg

SEQ ID NO: 13514 - DNA, 21 bp, Homo sapiens
attaagcgccrgtgttctgag

SEQ ID NO: 13515 - DNA, 21 bp, Homo sapiens
cagacttacargcacagggcc

SEQ ID NO: 13516 - DNA, 21 bp, Homo sapiens
tagatcagccstaaatgcctt

SEQ ID NO: 13517 - DNA, 21 bp, Homo sapiens
atgtggtcaartggatttttc

SEQ ID NO: 13518 - DNA, 21 bp, Homo sapiens
tttctccaacrtctatgtcaa

SEQ ID NO: 13519 - DNA, 21 bp, Homo sapiens
tacagcagacraagtgctaaa

SEQ ID NO: 13520 - DNA, 21 bp, Homo sapiens
gtgctgagcargtggacccaa

SEQ ID NO: 13521 - DNA, 21 bp, Homo sapiens
tttcactgctsaagagtagtt

SEQ ID NO: 13522 - DNA, 21 bp, Homo sapiens
aggcatttttscattctgaat

SEQ ID NO: 13523 - DNA, 21 bp, Homo sapiens
gggaattttcyctggagagtg

SEQ ID NO: 13524 - DNA, 21 bp, Homo sapiens
gggagcctcaygttgtgtgta

SEQ ID NO: 13525 - DNA, 21 bp, Homo sapiens
gcagtctccakgtcctcgttt

SEQ ID NO: 13526 - DNA, 21 bp, Homo sapiens
gcccagtataratcatccctc

SEQ ID NO: 13527 - DNA, 21 bp, Homo sapiens
catttgccctrgaaaacagga

SEQ ID NO: 13528 - DNA, 21 bp, Homo sapiens
accctgttttkgttcctccat

SEQ ID NO: 13529 - DNA, 21 bp, Homo sapiens
cttcttcaccrtagtactttt

SEQ ID NO: 13530 - DNA, 21 bp, Homo sapiens
ccgggagtctmacctctgcct

SEQ ID NO: 13531 - DNA, 21 bp, Homo sapiens
tgctagggacygtgtctagct

SEQ ID NO: 13532 - DNA, 21 bp, Homo sapiens
gatacgatgayggacactgca

SEQ ID NO: 13533 - DNA, 21 bp, Homo sapiens
cggctcttacrctgttgccaa

SEQ ID NO: 13534 - DNA, 21 bp, Homo sapiens
aaattatcackcctctctctg

SEQ ID NO: 13535 - DNA, 21 bp, Homo sapiens
cctcaaggtcwgggtccactt

SEQ ID NO: 13536 - DNA, 21 bp, Homo sapiens
tacagttgtayacaggtttac

SEQ ID NO: 13537 - DNA, 21 bp, Homo sapiens
cttggtttgcmagctagacct

SEQ ID NO: 13538 - DNA, 21 bp, Homo sapiens
aacaaaaagaygaccatgaga

SEQ ID NO: 13539 - DNA, 21 bp, Homo sapiens
tttggtcctamttagaaaggc

SEQ ID NO: 13540 - DNA, 21 bp, Homo sapiens
gagttagtacsgtgcgaggag

SEQ ID NO: 13541 - DNA, 21 bp, Homo sapiens
taccatggccrctctgacctg

SEQ ID NO: 13542 - DNA, 21 bp, Homo sapiens
tcaataagtcrccctacaagg

SEQ ID NO: 13543 - DNA, 21 bp, Homo sapiens
tgtatgtgtcyatgtggtgac

SEQ ID NO: 13544 - DNA, 21 bp, Homo sapiens
accctctggcrgccttggccc

SEQ ID NO: 13545 - DNA, 21 bp, Homo sapiens
cccagatgctrttggcagcca

SEQ ID NO: 13546 - DNA, 21 bp, Homo sapiens
gagtgttttgrttgccaacaa

SEQ ID NO: 13547 - DNA, 21 bp, Homo sapiens
gatcagactcrattctatttt

SEQ ID NO: 13548 - DNA, 21 bp, Homo sapiens
aagaaaagggygtttatagct

SEQ ID NO: 13549 - DNA, 21 bp, Homo sapiens
tttgtgaactrtaaagcattg

SEQ ID NO: 13550 - DNA, 21 bp, Homo sapiens
ccttgagaccyttctgaagac

SEQ ID NO: 13551 - DNA, 21 bp, Homo sapiens
ctgcacatgcrccctgagctt

SEQ ID NO: 13552 - DNA, 21 bp, Homo sapiens
ttccttctttmacagtcattt

SEQ ID NO: 13553 - DNA, 21 bp, Homo sapiens
gaactcaagtsagaaagaaag

SEQ ID NO: 13554 - DNA, 21 bp, Homo sapiens
ttagtgtctakccctggtcgg

SEQ ID NO: 13555 - DNA, 21 bp, Homo sapiens
ttttttttgtrtctagcagac

SEQ ID NO: 13556 - DNA, 21 bp, Homo sapiens
taatggaaagycttcgatata

SEQ ID NO: 13557 - DNA, 21 bp, Homo sapiens
actggtaaccstcaagaagag

SEQ ID NO: 13558 - DNA, 21 bp, Homo sapiens
aggtttcttayttctgtattg

SEQ ID NO: 13559 - DNA, 21 bp, Homo sapiens
ttgtggtatcrctgccaaaga

SEQ ID NO: 13560 - DNA, 21 bp, Homo sapiens
agtctgttackgccagttttg

SEQ ID NO: 13561 - DNA, 21 bp, Homo sapiens
tgaatgagagktagtcatctg

SEQ ID NO: 13562 - DNA, 21 bp, Homo sapiens
gggagagcaartggtttctca

SEQ ID NO: 13563 - DNA, 21 bp, Homo sapiens
tttgctcaaaygaagaaagag

SEQ ID NO: 13564 - DNA, 21 bp, Homo sapiens
ataaagagctstaaaatgtgc

SEQ ID NO: 13565 - DNA, 21 bp, Homo sapiens
ctctggaaccstgtggcactg

SEQ ID NO: 13566 - DNA, 21 bp, Homo sapiens
cacttcctttracgggttcac

SEQ ID NO: 13567 - DNA, 21 bp, Homo sapiens
gggcagggcaygaacctattg

SEQ ID NO: 13568 - DNA, 21 bp, Homo sapiens
attcatcacaraagtaggaag

SEQ ID NO: 13569 - DNA, 21 bp, Homo sapiens
atttcaagacygaacaggagt

SEQ ID NO: 13570 - DNA, 21 bp, Homo sapiens
gattccctgaygactacaggc

SEQ ID NO: 13571 - DNA, 21 bp, Homo sapiens
agtgtacagtkagcccttcat

SEQ ID NO: 13572 - DNA, 21 bp, Homo sapiens
gatgtttcatragctccctat

SEQ ID NO: 13573 - DNA, 21 bp, Homo sapiens
tgcaatgaatktatagaggac

SEQ ID NO: 13574 - DNA, 21 bp, Homo sapiens
ataaaatatcstgggaaaaaa

SEQ ID NO: 13575 - DNA, 21 bp, Homo sapiens
gtttagtaacrtgtcattcct

SEQ ID NO: 13576 - DNA, 21 bp, Homo sapiens
ggcataaagargatgttgatt

SEQ ID NO: 13577 - DNA, 21 bp, Homo sapiens
ccaatcgaggyttcaaacaag

SEQ ID NO: 13578 - DNA, 21 bp, Homo sapiens
aaaagtgtacyactggacgaa

SEQ ID NO: 13579 - DNA, 21 bp, Homo sapiens
ttccttgtggygctctcagaa

SEQ ID NO: 13580 - DNA, 21 bp, Homo sapiens
ggcctacaggkgatgacatct

SEQ ID NO: 13581 - DNA, 21 bp, Homo sapiens
agtttagcagyactcaaggca

SEQ ID NO: 13582 - DNA, 21 bp, Homo sapiens
agacttactgsctgtgtggag

SEQ ID NO: 13583 - DNA, 21 bp, Homo sapiens
ctttctggatygagatgccac

SEQ ID NO: 13584 - DNA, 21 bp, Homo sapiens
tgggcatttgraaaatcaacc

SEQ ID NO: 13585 - DNA, 21 bp, Homo sapiens
aaccccttgayctttcacttt

SEQ ID NO: 13586 - DNA, 21 bp, Homo sapiens
agaaaccattkccatttctct

SEQ ID NO: 13587 - DNA, 21 bp, Homo sapiens
agctgaagagrcttccctgga

SEQ ID NO: 13588 - DNA, 21 bp, Homo sapiens
tatcatgaggsagtaggaact

SEQ ID NO: 13589 - DNA, 21 bp, Homo sapiens
atcctttgatmctgatgctag

SEQ ID NO: 13590 - DNA, 21 bp, Homo sapiens
ataaagaaatraaactggaca

SEQ ID NO: 13591 - DNA, 21 bp, Homo sapiens
tactggttatrttcatttatt

SEQ ID NO: 13592 - DNA, 21 bp, Homo sapiens
tctcaaaagawggtaaaagaa

SEQ ID NO: 13593 - DNA, 21 bp, Homo sapiens
ctgacattatrattgcaacaa

SEQ ID NO: 13594 - DNA, 21 bp, Homo sapiens
gattttcccargggattctat

SEQ ID NO: 13595 - DNA, 21 bp, Homo sapiens
ttagttgctgktgtactcaat

SEQ ID NO: 13596 - DNA, 21 bp, Homo sapiens
ttcataaagcyttctgatgag

SEQ ID NO: 13597 - DNA, 21 bp, Homo sapiens
aaaagagataygcaagaaacc

SEQ ID NO: 13598 - DNA, 21 bp, Homo sapiens
ggtccaattaycgactacttg

SEQ ID NO: 13599 - DNA, 21 bp, Homo sapiens
gggaaaaaatsccggggcatt

SEQ ID NO: 13600 - DNA, 21 bp, Homo sapiens
acgtgacatargtgtgaaata

SEQ ID NO: 13601 - DNA, 21 bp, Homo sapiens
aaactctcaayatctactaag

SEQ ID NO: 13602 - DNA, 21 bp, Homo sapiens
tagtgggtgaygtgtaaacac

SEQ ID NO: 13603 - DNA, 21 bp, Homo sapiens
accctgtgtamaaatctgtca

SEQ ID NO: 13604 - DNA, 21 bp, Homo sapiens
ttgtatcctgrgaggtatgga

SEQ ID NO: 13605 - DNA, 21 bp, Homo sapiens
acttttcagartttagcaagc

SEQ ID NO: 13606 - DNA, 21 bp, Homo sapiens
gaatatattayaagcactgct

SEQ ID NO: 13607 - DNA, 21 bp, Homo sapiens
cgtgtctttaragttacaatt

SEQ ID NO: 13608 - DNA, 21 bp, Homo sapiens
cagacaataartggcaaagaa

SEQ ID NO: 13609 - DNA, 21 bp, Homo sapiens
tttgccaagtrctttgaggat

SEQ ID NO: 13610 - DNA, 21 bp, Homo sapiens
gtgggtcctaraaaagccgag

SEQ ID NO: 13611 - DNA, 21 bp, Homo sapiens
atattttaaarcttatttacc

SEQ ID NO: 13612 - DNA, 21 bp, Homo sapiens
gatatttatckacttgaaaga

SEQ ID NO: 13613 - DNA, 21 bp, Homo sapiens
tcagtagcatraaaagagctg

SEQ ID NO: 13614 - DNA, 21 bp, Homo sapiens
aagttatagtratccatataa

SEQ ID NO: 13615 - DNA, 21 bp, Homo sapiens
atgtgcaaacytagtcttata

SEQ ID NO: 13616 - DNA, 21 bp, Homo sapiens
acctcctactyttgaacttgc

SEQ ID NO: 13617 - DNA, 21 bp, Homo sapiens
tagatccaaartcagggcccc

SEQ ID NO: 13618 - DNA, 21 bp, Homo sapiens
ctctgctcccmagtgaattca

SEQ ID NO: 13619 - DNA, 21 bp, Homo sapiens
agtatgctacrtacccacaat

SEQ ID NO: 13620 - DNA, 21 bp, Homo sapiens
tgaataaagakcaaaaaatgt

SEQ ID NO: 13621 - DNA, 21 bp, Homo sapiens
ctattaactcyaaggagaaac

SEQ ID NO: 13622 - DNA, 21 bp, Homo sapiens
cttatcagctrtgttgcttta

SEQ ID NO: 13623 - DNA, 21 bp, Homo sapiens
tggagttggaygagaatcttt

SEQ ID NO: 13624 - DNA, 21 bp, Homo sapiens
tatggcccagrggtctcttgc

SEQ ID NO: 13625 - DNA, 21 bp, Homo sapiens
ctcctgcaggyggctcctttt

SEQ ID NO: 13626 - DNA, 21 bp, Homo sapiens
gagaatcagtrctgcctgcac

SEQ ID NO: 13627 - DNA, 21 bp, Homo sapiens
atctcctatakatcaggacag

SEQ ID NO: 13628 - DNA, 21 bp, Homo sapiens
ttcatcctgaygccctgtagc

SEQ ID NO: 13629 - DNA, 21 bp, Homo sapiens
atgtgaaaacrttgggctcct

SEQ ID NO: 13630 - DNA, 21 bp, Homo sapiens
tacaattcacwtgggtaccct

SEQ ID NO: 13631 - DNA, 21 bp, Homo sapiens
ttctccttttrgtctgaggca

SEQ ID NO: 13632 - DNA, 21 bp, Homo sapiens
atgaaaaccayctggatatag

SEQ ID NO: 13633 - DNA, 21 bp, Homo sapiens
gtggtcctcaraaaataggac

SEQ ID NO: 13634 - DNA, 21 bp, Homo sapiens
ccaacaccccraagagaatga

SEQ ID NO: 13635 - DNA, 21 bp, Homo sapiens
ccttttgctaygcctgagagg

SEQ ID NO: 13636 - DNA, 21 bp, Homo sapiens
caaagccacartgtaatggta

SEQ ID NO: 13637 - DNA, 21 bp, Homo sapiens
atcattttacraggcatttcg

SEQ ID NO: 13638 - DNA, 21 bp, Homo sapiens
caaaagtgacrgattctttcc

SEQ ID NO: 13639 - DNA, 21 bp, Homo sapiens
tgtttctgaaraataatctgg

SEQ ID NO: 13640 - DNA, 21 bp, Homo sapiens
aaaatggttgraaaagtcacg

SEQ ID NO: 13641 - DNA, 21 bp, Homo sapiens
acaaactgaaraatgtcacat

SEQ ID NO: 13642 - DNA, 21 bp, Homo sapiens
taaggagtacyacactagcat

SEQ ID NO: 13643 - DNA, 21 bp, Homo sapiens
ttctacagtcracatgtcatt

SEQ ID NO: 13644 - DNA, 21 bp, Homo sapiens
accagctgtgkaagagtggct

SEQ ID NO: 13645 - DNA, 21 bp, Homo sapiens
catctcaggarcagagtttaa

SEQ ID NO: 13646 - DNA, 21 bp, Homo sapiens
tttgtgtgttkgaattaatga

SEQ ID NO: 13647 - DNA, 21 bp, Homo sapiens
ggtagtgtgtktattttactg

SEQ ID NO: 13648 - DNA, 21 bp, Homo sapiens
gttgctagggygtggcaggac

SEQ ID NO: 13649 - DNA, 21 bp, Homo sapiens
gtatgtctgcrgggagcacag

SEQ ID NO: 13650 - DNA, 21 bp, Homo sapiens
aagtccttggyatcaaggcat

SEQ ID NO: 13651 - DNA, 21 bp, Homo sapiens
ttggacatcaygtcacgggcc

SEQ ID NO: 13652 - DNA, 21 bp, Homo sapiens
cgtaggaatamatcaacagga

SEQ ID NO: 13653 - DNA, 21 bp, Homo sapiens
cagagtcagcrccctgtaggc

SEQ ID NO: 13654 - DNA, 21 bp, Homo sapiens
tctaatgcagmagggaaacaa

SEQ ID NO: 13655 - DNA, 21 bp, Homo sapiens
tagcagaggamtcccagtgac

SEQ ID NO: 13656 - DNA, 21 bp, Homo sapiens
agtaatcctamacatttgtat

SEQ ID NO: 13657 - DNA, 21 bp, Homo sapiens
gctttctcacycttaacaggt

SEQ ID NO: 13658 - DNA, 21 bp, Homo sapiens
agacaccgccrtgagcccaat

SEQ ID NO: 13659 - DNA, 21 bp, Homo sapiens
taattttacargtgagcatcc

SEQ ID NO: 13660 - DNA, 21 bp, Homo sapiens
ccaggaacacrgcattctcaa

SEQ ID NO: 13661 - DNA, 21 bp, Homo sapiens
aaggctgtgaygttgccactc

SEQ ID NO: 13662 - DNA, 21 bp, Homo sapiens
cagttaggcawaataagagaa

SEQ ID NO: 13663 - DNA, 21 bp, Homo sapiens
aatgtgttaamcagatgaata

SEQ ID NO: 13664 - DNA, 21 bp, Homo sapiens
catatccctcrggcgtccttt

SEQ ID NO: 13665 - DNA, 21 bp, Homo sapiens
tggctactccrtccttctcag

SEQ ID NO: 13666 - DNA, 21 bp, Homo sapiens
gaacatcctgkctacagcatg

SEQ ID NO: 13667 - DNA, 21 bp, Homo sapiens
tcagggccatrtttactcact

SEQ ID NO: 13668 - DNA, 21 bp, Homo sapiens
tagtaagtagrgtatgttctg

SEQ ID NO: 13669 - DNA, 21 bp, Homo sapiens
ttgtgtccgtsggaaagctgg

SEQ ID NO: 13670 - DNA, 21 bp, Homo sapiens
aaggacttcarcccataatcc

SEQ ID NO: 13671 - DNA, 21 bp, Homo sapiens
ccatggtaagkttgatggtgc

SEQ ID NO: 13672 - DNA, 21 bp, Homo sapiens
acccaggaagsgctgagccac

SEQ ID NO: 13673 - DNA, 21 bp, Homo sapiens
gctggccaggygggagctgac

SEQ ID NO: 13674 - DNA, 21 bp, Homo sapiens
cagaaatgacmagacaagaaa

SEQ ID NO: 13675 - DNA, 21 bp, Homo sapiens
tcagaataccyatatgcaaca

SEQ ID NO: 13676 - DNA, 21 bp, Homo sapiens
cccctaaacarcagtgcccta

SEQ ID NO: 13677 - DNA, 21 bp, Homo sapiens
caacaaccctrtagggtaggc

SEQ ID NO: 13678 - DNA, 21 bp, Homo sapiens
ggaatgactgwccgtgatgag

SEQ ID NO: 13679 - DNA, 21 bp, Homo sapiens
tcaggtttaasattagagagg

SEQ ID NO: 13680 - DNA, 21 bp, Homo sapiens
gctacaatgamattgcgcttg

SEQ ID NO: 13681 - DNA, 21 bp, Homo sapiens
cacaaaggcgrtatgttcaac

SEQ ID NO: 13682 - DNA, 21 bp, Homo sapiens
ctggaactaayggctaaaaaa

SEQ ID NO: 13683 - DNA, 21 bp, Homo sapiens
tttagctatasagcaatttta

SEQ ID NO: 13684 - DNA, 21 bp, Homo sapiens
catgggagaaytggccttggc

SEQ ID NO: 13685 - DNA, 21 bp, Homo sapiens
aaaactgcccrattgtgatat

SEQ ID NO: 13686 - DNA, 21 bp, Homo sapiens
tccaggaggcrtgtgcttgtt

SEQ ID NO: 13687 - DNA, 21 bp, Homo sapiens
aaagctctagkacaaaaataa

SEQ ID NO: 13688 - DNA, 21 bp, Homo sapiens
gtgattatggrgaaaagttca

SEQ ID NO: 13689 - DNA, 21 bp, Homo sapiens
tggagaagcaracacccatgt

SEQ ID NO: 13690 - DNA, 21 bp, Homo sapiens
acatacacaarcttggggccc

SEQ ID NO: 13691 - DNA, 21 bp, Homo sapiens
taacatccackacccagactt

SEQ ID NO: 13692 - DNA, 21 bp, Homo sapiens
agtcatgaacrtcaagggcag

SEQ ID NO: 13693 - DNA, 21 bp, Homo sapiens
agcaagaagcrgacgagctgt

SEQ ID NO: 13694 - DNA, 21 bp, Homo sapiens
gcctggaaaayggactctgtc

SEQ ID NO: 13695 - DNA, 21 bp, Homo sapiens
agtgatgatgstgaggccagt

SEQ ID NO: 13696 - DNA, 21 bp, Homo sapiens
ctgaatctgaraatgcctgag

SEQ ID NO: 13697 - DNA, 21 bp, Homo sapiens
ttgattgattrggtttttttc

SEQ ID NO: 13698 - DNA, 21 bp, Homo sapiens
tctaggcagarctttggtcta

SEQ ID NO: 13699 - DNA, 21 bp, Homo sapiens
taatagttctygaggcttcat

SEQ ID NO: 13700 - DNA, 21 bp, Homo sapiens
caaaaagaatkttgataggca

SEQ ID NO: 13701 - DNA, 21 bp, Homo sapiens
tcaatgagatragtcttttta

SEQ ID NO: 13702 - DNA, 21 bp, Homo sapiens
ctcgagggctktctatggtat

SEQ ID NO: 13703 - DNA, 21 bp, Homo sapiens
gacatatttcygaacccagga

SEQ ID NO: 13704 - DNA, 21 bp, Homo sapiens
cctaaaaccayctgatctttg

SEQ ID NO: 13705 - DNA, 21 bp, Homo sapiens
attcaacagtygaccccagct

SEQ ID NO: 13706 - DNA, 21 bp, Homo sapiens
ctaattttggmgataagcagc

SEQ ID NO: 13707 - DNA, 21 bp, Homo sapiens
atcaaagtggrtggcccttat

SEQ ID NO: 13708 - DNA, 21 bp, Homo sapiens
acaggaattcrtggcccaatt

SEQ ID NO: 13709 - DNA, 21 bp, Homo sapiens
aataaagaaayttactcgctg

SEQ ID NO: 13710 - DNA, 21 bp, Homo sapiens
aaacccttcaygtgggagctg

SEQ ID NO: 13711 - DNA, 21 bp, Homo sapiens
gcttaattaaytacatcctga

SEQ ID NO: 13712 - DNA, 21 bp, Homo sapiens
tctattccatytccgaatggg

SEQ ID NO: 13713 - DNA, 21 bp, Homo sapiens
agcctaaaacraacagcattc

SEQ ID NO: 13714 - DNA, 21 bp, Homo sapiens
cgatcaatgcrataggccgcc

SEQ ID NO: 13715 - DNA, 21 bp, Homo sapiens
ccactctggaygcaggcgaga

SEQ ID NO: 13716 - DNA, 21 bp, Homo sapiens
tctgaagccaygtactgctgg

SEQ ID NO: 13717 - DNA, 21 bp, Homo sapiens
gagctacctcrataacagggg

SEQ ID NO: 13718 - DNA, 21 bp, Homo sapiens
caaatgacacrtctcttatga

SEQ ID NO: 13719 - DNA, 21 bp, Homo sapiens
tatcaagttcmgaagttttcc

SEQ ID NO: 13720 - DNA, 21 bp, Homo sapiens
atttattcagytctgtgtagg

SEQ ID NO: 13721 - DNA, 21 bp, Homo sapiens
gtggttcaaayaatgctgtgg

SEQ ID NO: 13722 - DNA, 21 bp, Homo sapiens
gcactgtacaragattggttt

SEQ ID NO: 13723 - DNA, 21 bp, Homo sapiens
tgattctgctyaatttagaat

SEQ ID NO: 13724 - DNA, 21 bp, Homo sapiens
tggcacccagrgagaggcaac

SEQ ID NO: 13725 - DNA, 21 bp, Homo sapiens
aaatgtgaggraaaaaatacg

SEQ ID NO: 13726 - DNA, 21 bp, Homo sapiens
agtcacttacktttcctaggg

SEQ ID NO: 13727 - DNA, 21 bp, Homo sapiens
aacaggcctayattctagtct

SEQ ID NO: 13728 - DNA, 21 bp, Homo sapiens
gacccgggagragcaatttca

SEQ ID NO: 13729 - DNA, 21 bp, Homo sapiens
atctctgaatkttgtgcgtat

SEQ ID NO: 13730 - DNA, 21 bp, Homo sapiens
tcattacttaygtttttatag

SEQ ID NO: 13731 - DNA, 21 bp, Homo sapiens
ttggcaacagktcatacaata

SEQ ID NO: 13732 - DNA, 21 bp, Homo sapiens
tttacactcargagagctggg

SEQ ID NO: 13733 - DNA, 21 bp, Homo sapiens
ctatattttcyagcactgatc

SEQ ID NO: 13734 - DNA, 21 bp, Homo sapiens
atggttatacrtgcacatatg

SEQ ID NO: 13735 - DNA, 21 bp, Homo sapiens
tctcagggccrtcgattattt

SEQ ID NO: 13736 - DNA, 21 bp, Homo sapiens
taaaaaggggstcggagctct

SEQ ID NO: 13737 - DNA, 21 bp, Homo sapiens
tcagcttttaygctctgtgac

SEQ ID NO: 13738 - DNA, 21 bp, Homo sapiens
gctgctgtgasccagtcattg

SEQ ID NO: 13739 - DNA, 21 bp, Homo sapiens
aaagggcgctwctagtccaaa

SEQ ID NO: 13740 - DNA, 21 bp, Homo sapiens
cacatgatcartcctggtctt

SEQ ID NO: 13741 - DNA, 21 bp, Homo sapiens
tgtttactgamagccaattat

SEQ ID NO: 13742 - DNA, 21 bp, Homo sapiens
cacgctggtgrcgactgaaac

SEQ ID NO: 13743 - DNA, 21 bp, Homo sapiens
aaagggacccrtcgctttcca

SEQ ID NO: 13744 - DNA, 21 bp, Homo sapiens
gggtgtcgaarctagtcttct

SEQ ID NO: 13745 - DNA, 21 bp, Homo sapiens
ctgcactgtcrgagcccttgg

SEQ ID NO: 13746 - DNA, 21 bp, Homo sapiens
ccttccatgawgatatctgaa

SEQ ID NO: 13747 - DNA, 21 bp, Homo sapiens
ccattagaggsgtccaatgct

SEQ ID NO: 13748 - DNA, 21 bp, Homo sapiens
gaatcctcttyaggaatgttg

SEQ ID NO: 13749 - DNA, 21 bp, Homo sapiens
acttgctgcawatatgtagag

SEQ ID NO: 13750 - DNA, 21 bp, Homo sapiens
actttttaaawtcatgcattt

SEQ ID NO: 13751 - DNA, 21 bp, Homo sapiens
ggggaattagyccacagggtt

SEQ ID NO: 13752 - DNA, 21 bp, Homo sapiens
ttgggttacayggcctgaaag

SEQ ID NO: 13753 - DNA, 21 bp, Homo sapiens
ctacaatttcwgggtgttttt

SEQ ID NO: 13754 - DNA, 21 bp, Homo sapiens
ttagaccaaaycaagacagtt

SEQ ID NO: 13755 - DNA, 21 bp, Homo sapiens
aaaatgctaayttttaggctt

SEQ ID NO: 13756 - DNA, 21 bp, Homo sapiens
tgactgacaayattagcagag

SEQ ID NO: 13757 - DNA, 21 bp, Homo sapiens
ctgaggcccaytcagaaaacc

SEQ ID NO: 13758 - DNA, 21 bp, Homo sapiens
acatctcagamaaccaggaaa

SEQ ID NO: 13759 - DNA, 21 bp, Homo sapiens
tataatttcartaactcccag

SEQ ID NO: 13760 - DNA, 21 bp, Homo sapiens
cttgtatcaayggaaaaattt

SEQ ID NO: 13761 - DNA, 21 bp, Homo sapiens
tggaatttaamactgccaaaa

SEQ ID NO: 13762 - DNA, 21 bp, Homo sapiens
actaccggccrtgatttgggg

SEQ ID NO: 13763 - DNA, 21 bp, Homo sapiens
cattctgatcrgcctttgctt

SEQ ID NO: 13764 - DNA, 21 bp, Homo sapiens
cagtgcttccygggctcacct

SEQ ID NO: 13765 - DNA, 21 bp, Homo sapiens
atcagacatayagctcacaaa

SEQ ID NO: 13766 - DNA, 21 bp, Homo sapiens
atgatcttccrctccggcttt

SEQ ID NO: 13767 - DNA, 21 bp, Homo sapiens
gatgacttcgwtttctgctcc

SEQ ID NO: 13768 - DNA, 21 bp, Homo sapiens
gcaaggtcagrcgggagcatg

SEQ ID NO: 13769 - DNA, 21 bp, Homo sapiens
ccgctgagcakgggtccccag

SEQ ID NO: 13770 - DNA, 21 bp, Homo sapiens
actcaaaagayaccgtatgtc

SEQ ID NO: 13771 - DNA, 21 bp, Homo sapiens
cagaactgctmgtgtaaccca

SEQ ID NO: 13772 - DNA, 21 bp, Homo sapiens
ataccctgatmaaattgttac

SEQ ID NO: 13773 - DNA, 21 bp, Homo sapiens
aaggagaaacracaggacgac

SEQ ID NO: 13774 - DNA, 21 bp, Homo sapiens
tgaagcatttmgggatcttag

SEQ ID NO: 13775 - DNA, 21 bp, Homo sapiens
acagatggctstcaaggtcgc

SEQ ID NO: 13776 - DNA, 21 bp, Homo sapiens
cctgaaggaaygtaaaaccat

SEQ ID NO: 13777 - DNA, 21 bp, Homo sapiens
ccaaattccayactctaaata

SEQ ID NO: 13778 - DNA, 21 bp, Homo sapiens
acttttttctyatctgtattc

SEQ ID NO: 13779 - DNA, 21 bp, Homo sapiens
gagctactggrctgaggttcg

SEQ ID NO: 13780 - DNA, 21 bp, Homo sapiens
atgtgctgctrttaaacatta

SEQ ID NO: 13781 - DNA, 21 bp, Homo sapiens
ataatacaagracacttggac

SEQ ID NO: 13782 - DNA, 21 bp, Homo sapiens
ttggaattagrctgaggagct

SEQ ID NO: 13783 - DNA, 21 bp, Homo sapiens
tttactctgcratactcagta

SEQ ID NO: 13784 - DNA, 21 bp, Homo sapiens
gactaacccaygccttaagga

SEQ ID NO: 13785 - DNA, 21 bp, Homo sapiens
caaagggaaartgaaagcatt

SEQ ID NO: 13786 - DNA, 21 bp, Homo sapiens
acatgcttatrgttattctta

SEQ ID NO: 13787 - DNA, 21 bp, Homo sapiens
acagtctggtwgaaagctttt

SEQ ID NO: 13788 - DNA, 21 bp, Homo sapiens
tcataggaatrttgtgagctc

SEQ ID NO: 13789 - DNA, 21 bp, Homo sapiens
ctttggagaastacgagtttt

SEQ ID NO: 13790 - DNA, 21 bp, Homo sapiens
aaaatgttccrccaaggcctc

SEQ ID NO: 13791 - DNA, 21 bp, Homo sapiens
agacactctcyccaagatgct

SEQ ID NO: 13792 - DNA, 21 bp, Homo sapiens
aattagagtasatcagtattt

SEQ ID NO: 13793 - DNA, 21 bp, Homo sapiens
agggctttctrtttcagatca

SEQ ID NO: 13794 - DNA, 21 bp, Homo sapiens
catatgttccrgaggtgagga

SEQ ID NO: 13795 - DNA, 21 bp, Homo sapiens
gcaatccaaasagaaaaggga

SEQ ID NO: 13796 - DNA, 21 bp, Homo sapiens
ctatattcccragtctccttt

SEQ ID NO: 13797 - DNA, 21 bp, Homo sapiens
atgtagggcaygtggccccag

SEQ ID NO: 13798 - DNA, 21 bp, Homo sapiens
caaagccccartttgcccagc

SEQ ID NO: 13799 - DNA, 21 bp, Homo sapiens
ctcacctttayaggcttctca

SEQ ID NO: 13800 - DNA, 21 bp, Homo sapiens
gcaggactaarcctgggcctt

SEQ ID NO: 13801 - DNA, 21 bp, Homo sapiens
ctgaccttcaycaagagcgcc

SEQ ID NO: 13802 - DNA, 21 bp, Homo sapiens
tttcgagtacratccagagaa

SEQ ID NO: 13803 - DNA, 21 bp, Homo sapiens
tcaggaatgamgtacatatat

SEQ ID NO: 13804 - DNA, 21 bp, Homo sapiens
cagttacttgrgaaatgtttg

SEQ ID NO: 13805 - DNA, 21 bp, Homo sapiens
tctacttagckataaaacatg

SEQ ID NO: 13806 - DNA, 21 bp, Homo sapiens
tgacaaatagyaggtggtcaa

SEQ ID NO: 13807 - DNA, 21 bp, Homo sapiens
cctatgaaggyctcattaaca

SEQ ID NO: 13808 - DNA, 21 bp, Homo sapiens
ccattgtgcayggccttgagt

SEQ ID NO: 13809 - DNA, 21 bp, Homo sapiens
acaagttcctrtactgctcgg

SEQ ID NO: 13810 - DNA, 21 bp, Homo sapiens
actgactttgygctttttagg

SEQ ID NO: 13811 - DNA, 21 bp, Homo sapiens
ttttcccatayttttatatac

SEQ ID NO: 13812 - DNA, 21 bp, Homo sapiens
ttatctgaaastacgcctttg

SEQ ID NO: 13813 - DNA, 21 bp, Homo sapiens
atctcacacartgaaagaggg

SEQ ID NO: 13814 - DNA, 21 bp, Homo sapiens
aaggcaaacawggtgttatta

SEQ ID NO: 13815 - DNA, 21 bp, Homo sapiens
tttgaatgtaraacggcctag

SEQ ID NO: 13816 - DNA, 21 bp, Homo sapiens
acatgaaatcrttttcttagg

SEQ ID NO: 13817 - DNA, 21 bp, Homo sapiens
ttcctggtagrcaagccaatc

SEQ ID NO: 13818 - DNA, 21 bp, Homo sapiens
atagatataastatggaaaac

SEQ ID NO: 13819 - DNA, 21 bp, Homo sapiens
agaagtttctkgaacccctgg

SEQ ID NO: 13820 - DNA, 21 bp, Homo sapiens
tgtgagcaagsgttttcaggt

SEQ ID NO: 13821 - DNA, 21 bp, Homo sapiens
tagagcagcartgagcacttg

SEQ ID NO: 13822 - DNA, 21 bp, Homo sapiens
tgaaaaggtasagaaaatgtc

SEQ ID NO: 13823 - DNA, 21 bp, Homo sapiens
ttagggaaagrtgtgacatga

SEQ ID NO: 13824 - DNA, 21 bp, Homo sapiens
aatacgtgctscaaaagaaaa

SEQ ID NO: 13825 - DNA, 21 bp, Homo sapiens
gggtggcaccrtgccccatgc

SEQ ID NO: 13826 - DNA, 21 bp, Homo sapiens
tgcctgatgcrgtgcagtact

SEQ ID NO: 13827 - DNA, 21 bp, Homo sapiens
cattttcctgmtccattttct

SEQ ID NO: 13828 - DNA, 21 bp, Homo sapiens
gcagagccatmttacaattta

SEQ ID NO: 13829 - DNA, 21 bp, Homo sapiens
atcttacttawatccatctag

SEQ ID NO: 13830 - DNA, 21 bp, Homo sapiens
gtaataaggtmatttagattt

SEQ ID NO: 13831 - DNA, 21 bp, Homo sapiens
ttgatgtctcraatttttttc

SEQ ID NO: 13832 - DNA, 21 bp, Homo sapiens
gggcagcaagwggatgattcc

SEQ ID NO: 13833 - DNA, 21 bp, Homo sapiens
ttgttaacacraagcaaaaag

SEQ ID NO: 13834 - DNA, 21 bp, Homo sapiens
gtcaagagcakgtatccttag

SEQ ID NO: 13835 - DNA, 21 bp, Homo sapiens
tcctaaccttsccttgataag

SEQ ID NO: 13836 - DNA, 21 bp, Homo sapiens
tggctaagggytacatttgat

SEQ ID NO: 13837 - DNA, 21 bp, Homo sapiens
aaaatacataygaaaggtaca

SEQ ID NO: 13838 - DNA, 21 bp, Homo sapiens
tcccctaggascgcacctcgt

SEQ ID NO: 13839 - DNA, 21 bp, Homo sapiens
aagttttgaayagaatctaag

SEQ ID NO: 13840 - DNA, 21 bp, Homo sapiens
gcgactccttygattccctcc

SEQ ID NO: 13841 - DNA, 21 bp, Homo sapiens
actttatagcrctggcaaaac

SEQ ID NO: 13842 - DNA, 21 bp, Homo sapiens
atactagaatratcatcagct

SEQ ID NO: 13843 - DNA, 21 bp, Homo sapiens
ctgcttagacraacccatgta

SEQ ID NO: 13844 - DNA, 21 bp, Homo sapiens
gaacactggayggcaagatac

SEQ ID NO: 13845 - DNA, 21 bp, Homo sapiens
aaaggttctcsgccaatttca

SEQ ID NO: 13846 - DNA, 21 bp, Homo sapiens
tctgtcagcawccataataaa

SEQ ID NO: 13847 - DNA, 21 bp, Homo sapiens
agctaatcaawgggcttgaag

SEQ ID NO: 13848 - DNA, 21 bp, Homo sapiens
acatggctttygacactcgcc

SEQ ID NO: 13849 - DNA, 21 bp, Homo sapiens
gtcagttcccrtaataacata

SEQ ID NO: 13850 - DNA, 21 bp, Homo sapiens
gtaaaatttgraactgggttc

SEQ ID NO: 13851 - DNA, 21 bp, Homo sapiens
cctctagcacwgtactcattg

SEQ ID NO: 13852 - DNA, 21 bp, Homo sapiens
cagagcaaggmaagtgttgat

SEQ ID NO: 13853 - DNA, 21 bp, Homo sapiens
agattcttggktcttttaggc

SEQ ID NO: 13854 - DNA, 21 bp, Homo sapiens
agattgagagrccattgcccc

SEQ ID NO: 13855 - DNA, 21 bp, Homo sapiens
ttgttgaaacrtaatgagcgt

SEQ ID NO: 13856 - DNA, 21 bp, Homo sapiens
cccaaaaagtraacaggtgtg

SEQ ID NO: 13857 - DNA, 21 bp, Homo sapiens
tgggccaaagrtagtgcctgg

SEQ ID NO: 13858 - DNA, 21 bp, Homo sapiens
ttgggctgtcrtctttgtagc

SEQ ID NO: 13859 - DNA, 21 bp, Homo sapiens
tggaacactgsgatgcattta

SEQ ID NO: 13860 - DNA, 21 bp, Homo sapiens
atactcattayaaatactctc

SEQ ID NO: 13861 - DNA, 21 bp, Homo sapiens
aatattcatgyaattgctggt

SEQ ID NO: 13862 - DNA, 21 bp, Homo sapiens
cagcttagatycaacatgccc

SEQ ID NO: 13863 - DNA, 21 bp, Homo sapiens
tctaagaaacrggatatacgt

SEQ ID NO: 13864 - DNA, 21 bp, Homo sapiens
ggtggctgacracccatagtg

SEQ ID NO: 13865 - DNA, 21 bp, Homo sapiens
tctcaggatckctggttcgtg

SEQ ID NO: 13866 - DNA, 21 bp, Homo sapiens
aaaatgtatcmtttgacatgg

SEQ ID NO: 13867 - DNA, 21 bp, Homo sapiens
tgaagatggtygtgcaacctt

SEQ ID NO: 13868 - DNA, 21 bp, Homo sapiens
gagtttagtgyccttcttggg

SEQ ID NO: 13869 - DNA, 21 bp, Homo sapiens
aatacctaaawgtcaacacac

SEQ ID NO: 13870 - DNA, 21 bp, Homo sapiens
tagtagtatgytctgcaatgc

SEQ ID NO: 13871 - DNA, 21 bp, Homo sapiens
ttttgtagttkataacatatt

SEQ ID NO: 13872 - DNA, 21 bp, Homo sapiens
catttttaaarctaggcattt

SEQ ID NO: 13873 - DNA, 21 bp, Homo sapiens
actaaaaagawggcatggaca

SEQ ID NO: 13874 - DNA, 21 bp, Homo sapiens
ttaacagtcaktgcagagttt

SEQ ID NO: 13875 - DNA, 21 bp, Homo sapiens
tacatttctayttaaactcaa

SEQ ID NO: 13876 - DNA, 21 bp, Homo sapiens
taacttcaatytgtgaaagcc

SEQ ID NO: 13877 - DNA, 21 bp, Homo sapiens
ctttcagccayagcacattta

SEQ ID NO: 13878 - DNA, 21 bp, Homo sapiens
ttataaatgcrtacgccagag

SEQ ID NO: 13879 - DNA, 21 bp, Homo sapiens
ctcaaaggcaygaaaatacag

SEQ ID NO: 13880 - DNA, 21 bp, Homo sapiens
atcaatagaamccagtggcat

SEQ ID NO: 13881 - DNA, 21 bp, Homo sapiens
tgatttggagracagacattc

SEQ ID NO: 13882 - DNA, 21 bp, Homo sapiens
ccctgtagtcstattagaata

SEQ ID NO: 13883 - DNA, 21 bp, Homo sapiens
actcagttatyctctggggct

SEQ ID NO: 13884 - DNA, 21 bp, Homo sapiens
cagcacccttsattcatcagc

SEQ ID NO: 13885 - DNA, 21 bp, Homo sapiens
acacttacttrttcagacaac

SEQ ID NO: 13886 - DNA, 21 bp, Homo sapiens
caagctaacartggagactgc

SEQ ID NO: 13887 - DNA, 21 bp, Homo sapiens
ccttaaagggrtgcggttttt

SEQ ID NO: 13888 - DNA, 21 bp, Homo sapiens
ttgttcatagygcagttggta

SEQ ID NO: 13889 - DNA, 21 bp, Homo sapiens
agaataatctktctgccatta

SEQ ID NO: 13890 - DNA, 21 bp, Homo sapiens
agcaaaatacrtactcaaagt

SEQ ID NO: 13891 - DNA, 21 bp, Homo sapiens
agaaagattgsacctgcctgg

SEQ ID NO: 13892 - DNA, 21 bp, Homo sapiens
aggtgagggcyactgtgcagg

SEQ ID NO: 13893 - DNA, 21 bp, Homo sapiens
tggctttcttyagtcagaggt

SEQ ID NO: 13894 - DNA, 21 bp, Homo sapiens
tcgcgagtccygcatggcaca

SEQ ID NO: 13895 - DNA, 21 bp, Homo sapiens
ttaaaaagccrtgttcctgcc

SEQ ID NO: 13896 - DNA, 21 bp, Homo sapiens
ctgtgtgtcasttgctgcgtg

SEQ ID NO: 13897 - DNA, 21 bp, Homo sapiens
agcgggaaccraaagcctggc

SEQ ID NO: 13898 - DNA, 21 bp, Homo sapiens
ggtccggccaytgcaagtttt

SEQ ID NO: 13899 - DNA, 21 bp, Homo sapiens
tcccagcttckgagccaatgc

SEQ ID NO: 13900 - DNA, 21 bp, Homo sapiens
tatatgcctcyactcttgagg

SEQ ID NO: 13901 - DNA, 21 bp, Homo sapiens
ttccccacctytgacctgctg

SEQ ID NO: 13902 - DNA, 21 bp, Homo sapiens
tacatgcttaytgtaaatgac

SEQ ID NO: 13903 - DNA, 21 bp, Homo sapiens
ttgtacgaggrgaaagaaaaa

SEQ ID NO: 13904 - DNA, 21 bp, Homo sapiens
aaatcgtcctygcccaccctt

SEQ ID NO: 13905 - DNA, 21 bp, Homo sapiens
ctaatttactrggaggcttcc

SEQ ID NO: 13906 - DNA, 21 bp, Homo sapiens
agtactcaacrtctctcaaat

SEQ ID NO: 13907 - DNA, 21 bp, Homo sapiens
ggaaatgcttygtcttcgtgg

SEQ ID NO: 13908 - DNA, 21 bp, Homo sapiens
ataccacaaamccaggtctcc

SEQ ID NO: 13909 - DNA, 21 bp, Homo sapiens
gaccacgcctycggtgctctc

SEQ ID NO: 13910 - DNA, 21 bp, Homo sapiens
catctgccctsacccttggcc

SEQ ID NO: 13911 - DNA, 21 bp, Homo sapiens
cattcattggstcctggccat

SEQ ID NO: 13912 - DNA, 21 bp, Homo sapiens
ttaaagtcacrcagccaatgg

SEQ ID NO: 13913 - DNA, 21 bp, Homo sapiens
agccagaatgygcagggcata

SEQ ID NO: 13914 - DNA, 21 bp, Homo sapiens
aggttggtaayggtgacatat

SEQ ID NO: 13915 - DNA, 21 bp, Homo sapiens
gactgcaccarccaagtccca

SEQ ID NO: 13916 - DNA, 21 bp, Homo sapiens
cttctacccaracaagcaggt

SEQ ID NO: 13917 - DNA, 21 bp, Homo sapiens
aaagacatttmtccccagggg

SEQ ID NO: 13918 - DNA, 21 bp, Homo sapiens
cttctgttcasgcaactccaa

SEQ ID NO: 13919 - DNA, 21 bp, Homo sapiens
atgaggcagcwtcacctgtgc

SEQ ID NO: 13920 - DNA, 21 bp, Homo sapiens
ttagcatcaawttagtaagca

SEQ ID NO: 13921 - DNA, 21 bp, Homo sapiens
aatttgcttgygaatcacttg

SEQ ID NO: 13922 - DNA, 21 bp, Homo sapiens
aattgagtccyttggtgtgaa

SEQ ID NO: 13923 - DNA, 21 bp, Homo sapiens
agctggtggcyagtgcaaagg

SEQ ID NO: 13924 - DNA, 21 bp, Homo sapiens
ggcgtggtgcraggtactcct

SEQ ID NO: 13925 - DNA, 21 bp, Homo sapiens
tttcatgatgygaaaaatgat

SEQ ID NO: 13926 - DNA, 21 bp, Homo sapiens
agaagtcaggyagaagcaatg

SEQ ID NO: 13927 - DNA, 21 bp, Homo sapiens
aggagaaccasgagtatggag

SEQ ID NO: 13928 - DNA, 21 bp, Homo sapiens
agcagtatccyttctagttct

SEQ ID NO: 13929 - DNA, 21 bp, Homo sapiens
agaaggaaacractctgacca

SEQ ID NO: 13930 - DNA, 21 bp, Homo sapiens
catagcttctyaaaatatcga

SEQ ID NO: 13931 - DNA, 21 bp, Homo sapiens
ttcatgctgcytccacaattt

SEQ ID NO: 13932 - DNA, 21 bp, Homo sapiens
cacattctaamaccacatcct

SEQ ID NO: 13933 - DNA, 21 bp, Homo sapiens
gagttagctcrgaatattcag

SEQ ID NO: 13934 - DNA, 21 bp, Homo sapiens
tgcctactgtrtacctatgat

SEQ ID NO: 13935 - DNA, 21 bp, Homo sapiens
agtggcaccaraattctcaaa

SEQ ID NO: 13936 - DNA, 21 bp, Homo sapiens
agaggtaactstgaagtgaaa

SEQ ID NO: 13937 - DNA, 21 bp, Homo sapiens
gactctattakgcattcatgt

SEQ ID NO: 13938 - DNA, 21 bp, Homo sapiens
tccaagtcatytgaaaaaaca

SEQ ID NO: 13939 - DNA, 21 bp, Homo sapiens
aaatgttctcrtaactttgca

SEQ ID NO: 13940 - DNA, 21 bp, Homo sapiens
cttttcagaamtctggaatga

SEQ ID NO: 13941 - DNA, 21 bp, Homo sapiens
ccatttttacrttagccttga

SEQ ID NO: 13942 - DNA, 21 bp, Homo sapiens
gtcatatcaartttttagagc

SEQ ID NO: 13943 - DNA, 21 bp, Homo sapiens
tattacaggcrgaaaatagcc

SEQ ID NO: 13944 - DNA, 21 bp, Homo sapiens
atctgtggagrgatgatgacc

SEQ ID NO: 13945 - DNA, 21 bp, Homo sapiens
atggatactawaggataaaca

SEQ ID NO: 13946 - DNA, 21 bp, Homo sapiens
tttaaattatstaggcctcat

SEQ ID NO: 13947 - DNA, 21 bp, Homo sapiens
aaattaaccawcttgccatct

SEQ ID NO: 13948 - DNA, 21 bp, Homo sapiens
atctcaggtayatcgatttac

SEQ ID NO: 13949 - DNA, 21 bp, Homo sapiens
ctacgtggcayggtcaaaaac

SEQ ID NO: 13950 - DNA, 21 bp, Homo sapiens
gagagaccagraaaatagagg

SEQ ID NO: 13951 - DNA, 21 bp, Homo sapiens
aaagaattacrgattcctaag

SEQ ID NO: 13952 - DNA, 21 bp, Homo sapiens
atacattgtamctcataagag

SEQ ID NO: 13953 - DNA, 21 bp, Homo sapiens
tttgcctctcrgttgaaacct

SEQ ID NO: 13954 - DNA, 21 bp, Homo sapiens
ataacagtgtycatggtatgt

SEQ ID NO: 13955 - DNA, 21 bp, Homo sapiens
aagattagccragaaggaaga

SEQ ID NO: 13956 - DNA, 21 bp, Homo sapiens
atcttggaaamattatcgatc

SEQ ID NO: 13957 - DNA, 21 bp, Homo sapiens
ccaaggcaatycatcacctct

SEQ ID NO: 13958 - DNA, 21 bp, Homo sapiens
ttgtacacttygtaggttagc

SEQ ID NO: 13959 - DNA, 21 bp, Homo sapiens
aagacgtgacygaacaatttt

SEQ ID NO: 13960 - DNA, 21 bp, Homo sapiens
ctgaaccctaygccacaaaca

SEQ ID NO: 13961 - DNA, 21 bp, Homo sapiens
atgcttacacmctggagtctt

SEQ ID NO: 13962 - DNA, 21 bp, Homo sapiens
aaacctggaasctttggaaac

SEQ ID NO: 13963 - DNA, 21 bp, Homo sapiens
cccgccttgtyacacgcctta

SEQ ID NO: 13964 - DNA, 21 bp, Homo sapiens
acaacatcacyggtatgggag

SEQ ID NO: 13965 - DNA, 21 bp, Homo sapiens
cgtgaaatccsctgcagtgaa

SEQ ID NO: 13966 - DNA, 21 bp, Homo sapiens
ggacagcggaygcttgaggag

SEQ ID NO: 13967 - DNA, 21 bp, Homo sapiens
acttttactcrgctgctaact

SEQ ID NO: 13968 - DNA, 21 bp, Homo sapiens
tctcctgcttyttcacatcac

SEQ ID NO: 13969 - DNA, 21 bp, Homo sapiens
cctctgggctyggattgtacc

SEQ ID NO: 13970 - DNA, 21 bp, Homo sapiens
gcaattccatyctcctttcca

SEQ ID NO: 13971 - DNA, 21 bp, Homo sapiens
agggaataatrtccaaaaagt

SEQ ID NO: 13972 - DNA, 21 bp, Homo sapiens
tgtaatatctrgctatccatt

SEQ ID NO: 13973 - DNA, 21 bp, Homo sapiens
cctgagatacmttggcctcag

SEQ ID NO: 13974 - DNA, 21 bp, Homo sapiens
caagctttatytcttgagttg

SEQ ID NO: 13975 - DNA, 21 bp, Homo sapiens
tggaatcagaytgtgcaagct

SEQ ID NO: 13976 - DNA, 21 bp, Homo sapiens
atggctctacscttggctttc

SEQ ID NO: 13977 - DNA, 21 bp, Homo sapiens
ttagagactcrtatgaaaaag

SEQ ID NO: 13978 - DNA, 21 bp, Homo sapiens
agaagtactcrccagaggcct

SEQ ID NO: 13979 - DNA, 21 bp, Homo sapiens
cttctataacrcaggaactat

SEQ ID NO: 13980 - DNA, 21 bp, Homo sapiens
tccacaactgwttttggaaag

SEQ ID NO: 13981 - DNA, 21 bp, Homo sapiens
aaatgagtggygtttataaca

SEQ ID NO: 13982 - DNA, 21 bp, Homo sapiens
ttctctaatcktccttttaca

SEQ ID NO: 13983 - DNA, 21 bp, Homo sapiens
gacttcacagyagtaagaagg

SEQ ID NO: 13984 - DNA, 21 bp, Homo sapiens
gatgaatcaaygactaagagc

SEQ ID NO: 13985 - DNA, 21 bp, Homo sapiens
tctttattgaytaccttgtgc

SEQ ID NO: 13986 - DNA, 21 bp, Homo sapiens
tgattttacaytggagcacag

SEQ ID NO: 13987 - DNA, 21 bp, Homo sapiens
tgctatgaacrctgtctccac

SEQ ID NO: 13988 - DNA, 21 bp, Homo sapiens
ctccaggcttyctgcccctgt

SEQ ID NO: 13989 - DNA, 21 bp, Homo sapiens
tgtaactatgraacaatgata

SEQ ID NO: 13990 - DNA, 21 bp, Homo sapiens
caggttaggayacagatgagg

SEQ ID NO: 13991 - DNA, 21 bp, Homo sapiens
gttgcaggcasttttgaaaga

SEQ ID NO: 13992 - DNA, 21 bp, Homo sapiens
tccggttgcaytctcatgttc

SEQ ID NO: 13993 - DNA, 21 bp, Homo sapiens
tggtttgagcstctcttgggt

SEQ ID NO: 13994 - DNA, 21 bp, Homo sapiens
aagccatgacrctttgcagag

SEQ ID NO: 13995 - DNA, 21 bp, Homo sapiens
acaaagccacmaacttctatc

SEQ ID NO: 13996 - DNA, 21 bp, Homo sapiens
cagtcagggtrtttttacagt

SEQ ID NO: 13997 - DNA, 21 bp, Homo sapiens
aaagtgctcaygtatatatgt

SEQ ID NO: 13998 - DNA, 21 bp, Homo sapiens
gatgatcctasaggaactgca

SEQ ID NO: 13999 - DNA, 21 bp, Homo sapiens
caggaaagctrggaataaaat

SEQ ID NO: 14000 - DNA, 21 bp, Homo sapiens
aacttcctacrctgtctacag

SEQ ID NO: 14001 - DNA, 21 bp, Homo sapiens
tccttttctayatgcccttct

SEQ ID NO: 14002 - DNA, 21 bp, Homo sapiens
atagaacatawcctaggccat

SEQ ID NO: 14003 - DNA, 21 bp, Homo sapiens
ctcatctactyagccctgcct

SEQ ID NO: 14004 - DNA, 21 bp, Homo sapiens
tattcttccayccaggagatg

SEQ ID NO: 14005 - DNA, 21 bp, Homo sapiens
aatgtcaatarttggttaaaa

SEQ ID NO: 14006 - DNA, 21 bp, Homo sapiens
aacaccaagayctatagttat

SEQ ID NO: 14007 - DNA, 21 bp, Homo sapiens
cgtcgtacgayctgatgaaaa

SEQ ID NO: 14008 - DNA, 21 bp, Homo sapiens
tgataagttcygtgttctgtc

SEQ ID NO: 14009 - DNA, 21 bp, Homo sapiens
actcttgtaaygatgtattag

SEQ ID NO: 14010 - DNA, 21 bp, Homo sapiens
aggcttaaagyggttgagtta

SEQ ID NO: 14011 - DNA, 21 bp, Homo sapiens
ggccagctgcytggggaccct

SEQ ID NO: 14012 - DNA, 21 bp, Homo sapiens
gtactgttaamaactatatcc

SEQ ID NO: 14013 - DNA, 21 bp, Homo sapiens
acattgaaatytgcaagacat

SEQ ID NO: 14014 - DNA, 21 bp, Homo sapiens
caattaatagyttggccacca

SEQ ID NO: 14015 - DNA, 21 bp, Homo sapiens
ttagtatataygttttgccta

SEQ ID NO: 14016 - DNA, 21 bp, Homo sapiens
tcttttcatawtttttcctac

SEQ ID NO: 14017 - DNA, 21 bp, Homo sapiens
aatattaaagygtaaaaaata

SEQ ID NO: 14018 - DNA, 21 bp, Homo sapiens
ccgactctctkttgcatttat

SEQ ID NO: 14019 - DNA, 21 bp, Homo sapiens
acctttgcgamctaaagtagt

SEQ ID NO: 14020 - DNA, 21 bp, Homo sapiens
gctttgaaagsatttctacca

SEQ ID NO: 14021 - DNA, 21 bp, Homo sapiens
tcctgtactcyttgaacattt

SEQ ID NO: 14022 - DNA, 21 bp, Homo sapiens
tacatgtggartcaataaagc

SEQ ID NO: 14023 - DNA, 21 bp, Homo sapiens
gaaactagaakcactgaacaa

SEQ ID NO: 14024 - DNA, 21 bp, Homo sapiens
agattctgttycaaggttaga

SEQ ID NO: 14025 - DNA, 21 bp, Homo sapiens
ggcttcctttscaatccaacc

SEQ ID NO: 14026 - DNA, 21 bp, Homo sapiens
catgattgtcrattatgatta

SEQ ID NO: 14027 - DNA, 21 bp, Homo sapiens
tgggcatcaartctacattat

SEQ ID NO: 14028 - DNA, 21 bp, Homo sapiens
tgcatgaagaytgactcttaa

SEQ ID NO: 14029 - DNA, 21 bp, Homo sapiens
tgaccaaagayggatgttctc

SEQ ID NO: 14030 - DNA, 21 bp, Homo sapiens
ggcactgctgyagttctcctg

SEQ ID NO: 14031 - DNA, 21 bp, Homo sapiens
agcaaagactyagggaagaag

SEQ ID NO: 14032 - DNA, 21 bp, Homo sapiens
tccctaggtgwtctaaaaaga

SEQ ID NO: 14033 - DNA, 21 bp, Homo sapiens
ctgacttaaaratgagttagt

SEQ ID NO: 14034 - DNA, 21 bp, Homo sapiens
tcgaaagtatrcccgcaggtc

SEQ ID NO: 14035 - DNA, 21 bp, Homo sapiens
tacacatgcaraggggccaac

SEQ ID NO: 14036 - DNA, 21 bp, Homo sapiens
aacagcagtgytcaatgttgg

SEQ ID NO: 14037 - DNA, 21 bp, Homo sapiens
acaggcatttrgcagcacaca

SEQ ID NO: 14038 - DNA, 21 bp, Homo sapiens
tctagtgttcrgttcaaatac

SEQ ID NO: 14039 - DNA, 21 bp, Homo sapiens
tgaccatataycctgaggctg

SEQ ID NO: 14040 - DNA, 21 bp, Homo sapiens
ggtgactctcragactccctt

SEQ ID NO: 14041 - DNA, 21 bp, Homo sapiens
cttggcttcaygttcctaagc

SEQ ID NO: 14042 - DNA, 21 bp, Homo sapiens
caaccatcaayggcagcagtc

SEQ ID NO: 14043 - DNA, 21 bp, Homo sapiens
tcttcacaacstaatagctct

SEQ ID NO: 14044 - DNA, 21 bp, Homo sapiens
gacatccactsgtttaaaaat

SEQ ID NO: 14045 - DNA, 21 bp, Homo sapiens
ggtttgaggawgtttttggcc

SEQ ID NO: 14046 - DNA, 21 bp, Homo sapiens
tcatgctcagygtttctttta

SEQ ID NO: 14047 - DNA, 21 bp, Homo sapiens
tggagattaaytgggcatccc

SEQ ID NO: 14048 - DNA, 21 bp, Homo sapiens
gattgtgcctsttatcccatg

SEQ ID NO: 14049 - DNA, 21 bp, Homo sapiens
agggaaacacygtggcaagga

SEQ ID NO: 14050 - DNA, 21 bp, Homo sapiens
aggtgttgcayattctgttca

SEQ ID NO: 14051 - DNA, 21 bp, Homo sapiens
atgagctactraaaaaaatcc

SEQ ID NO: 14052 - DNA, 21 bp, Homo sapiens
gtttaaagacyaaataagtac

SEQ ID NO: 14053 - DNA, 21 bp, Homo sapiens
tttgcacataytgatgatccc

SEQ ID NO: 14054 - DNA, 21 bp, Homo sapiens
tcaaaatattytttaaactgc

SEQ ID NO: 14055 - DNA, 21 bp, Homo sapiens
gaatcaaggayaaaaggtcaa

SEQ ID NO: 14056 - DNA, 21 bp, Homo sapiens
aacaattcttrtatgctgaaa

SEQ ID NO: 14057 - DNA, 21 bp, Homo sapiens
agaattttaayggaaacactt

SEQ ID NO: 14058 - DNA, 21 bp, Homo sapiens
aaaggcaacamatatccaatc

SEQ ID NO: 14059 - DNA, 21 bp, Homo sapiens
gaagaaaatgscatctcccac

SEQ ID NO: 14060 - DNA, 21 bp, Homo sapiens
caaatgttcayctttcaccat

SEQ ID NO: 14061 - DNA, 21 bp, Homo sapiens
aaaaattcaamatcatgatca

SEQ ID NO: 14062 - DNA, 21 bp, Homo sapiens
ttttcgcctcrtcccaacctg

SEQ ID NO: 14063 - DNA, 21 bp, Homo sapiens
aatgtgtatgwccttagaaat

SEQ ID NO: 14064 - DNA, 21 bp, Homo sapiens
gatcctcataktttaaaagct

SEQ ID NO: 14065 - DNA, 21 bp, Homo sapiens
ggcttccaaastttattacaa

SEQ ID NO: 14066 - DNA, 21 bp, Homo sapiens
tctagaactgragtacaacag

SEQ ID NO: 14067 - DNA, 21 bp, Homo sapiens
catcactttgmcacagtgttc

SEQ ID NO: 14068 - DNA, 21 bp, Homo sapiens
atctgtgcttwtgttacgaat

SEQ ID NO: 14069 - DNA, 21 bp, Homo sapiens
gctataggttkctctttctca

SEQ ID NO: 14070 - DNA, 21 bp, Homo sapiens
agacagcacaygtcgagagaa

SEQ ID NO: 14071 - DNA, 21 bp, Homo sapiens
gagttagcaayggtcagaaca

SEQ ID NO: 14072 - DNA, 21 bp, Homo sapiens
gaagcctcctygggaaacatt

SEQ ID NO: 14073 - DNA, 21 bp, Homo sapiens
cctgagtgccrctcccatttg

SEQ ID NO: 14074 - DNA, 21 bp, Homo sapiens
aaaaatctctrctaaggctca

SEQ ID NO: 14075 - DNA, 21 bp, Homo sapiens
gagctgtcagygccatgggtt

SEQ ID NO: 14076 - DNA, 21 bp, Homo sapiens
tggggcaggawgggctaagtg

SEQ ID NO: 14077 - DNA, 21 bp, Homo sapiens
cagttcctgtrggtttctcat

SEQ ID NO: 14078 - DNA, 21 bp, Homo sapiens
cttttgtaaaytgaaaggcca

SEQ ID NO: 14079 - DNA, 21 bp, Homo sapiens
aagaagttatsaagtaaaccg

SEQ ID NO: 14080 - DNA, 21 bp, Homo sapiens
acattcaccawatcatctttg

SEQ ID NO: 14081 - DNA, 21 bp, Homo sapiens
gaaataagctmatcttctatg

SEQ ID NO: 14082 - DNA, 21 bp, Homo sapiens
actctcttagygctattttta

SEQ ID NO: 14083 - DNA, 21 bp, Homo sapiens
aaaagggagaragatagtggg
